(19) United States
(12) Patent Application Publication
(10) Pub. No.: US 2016/0304961 A1
(43) Pub. Date: Oct. 20, 2016

(54) METHOD FOR PREDICTING THE RESPONSE TO CHEMOTHERAPY TREATMENT IN PATIENTS SUFFERING FROM COLORECTAL CANCER

(71) Applicants: SERVICIO ANDALUZ DE SALUD, Sevilla (ES); CONSEJO SUPERIOR DE INVESTIGACIONES CIENTÍFICAS, Sevilla (ES); FUNDACIÓN PÚBLICA ANDALUZA PARA LA GESTIÓN DE LA INVESTIGACIÓN DE LA SALUD EN SEVILLA, Sevilla (ES); UNIVERSIDAD DE SEVILLA, Sevilla (ES)

(72) Inventors: Rocío García Carbonero, Sevilla (ES); Purificación Estévez García, Sevilla (ES); Luis G. Paz-Ares Rodríguez, Sevilla (ES); Sonia Molina Pinelo, Sevilla (ES); Amancio Camero Moya, Sevilla (ES)

(21) Appl. No.: 15/024,689

(22) PCT Filed: Sep. 26, 2014
(86) PCT No.: PCT/ES2014/070731

§ 371 Date: Jul. 11, 2016

(30) Foreign Application Priority Data
Sep. 26, 2013 (ES) P201331405

(51) Int. Cl. C12Q 1/68

(52) U.S. Cl. CPC C12Q 1/6886; C12Q 2600/106; C12Q 2600/158; C12Q 2600/118

(57) ABSTRACT

The invention relates to a method for obtaining useful data for predicting the response to chemotherapy treatment in patients suffering from colorectal cancer, which allows a specific individual quantitative identification model to be established, based on the expression profile of certain marker genes.

### FIELD OF THE INVENTION

[0001] The present invention is comprised within of the field of molecular biology and medicine. It relates specifically to a method for obtaining useful data for predicting the response to chemotherapy treatment in colorectal cancer patients, which allows establishing an individual, specific quantitative recognition pattern, which can be modified with treatment, allowing establishing groups of patients with the same diagnosis but different clinical behavior, the most suitable treatment for each patient thereby being able to be selected. Response to the treatment is predicted by means of the analysis of the AQP, CLEC3B, DCK, DEFA5, DNAJC3, FBLIM1, GAS7, IGFBP4, KSR1, LONP1, MTHFD1L, NAV1, NIPBL, PALM2, PCDHGC3, PROS1, RARA, RSF1, TENC1, TGFBR3, TRAK2, VSNL1, WHSC1L1, WWC2, FAF1, FBXO9, KIAA1033, N4BP2L1, SLC12A, STARD13 and RB1CC1 gene expression profile.

### PRIOR ART

[0002] Colorectal cancer (CRC) is the third most common tumor in the world with more than 1.2 million new cases diagnosed every year and is responsible for about 8% of cancer-related deaths (http://globocan.iarc.fr). About two thirds of patients are diagnosed in early stages (I-III) of the disease, potentially curable by means of surgical treatment followed by adjuvant chemotherapy or not. Nevertheless, 40% of these patients eventually relapse after surgery. Post-surgery adjuvant chemotherapy treatment reduces the risk of tumor relapse by 10-20%. Overall, it is therefore estimated that about 80% of the patients do not benefit from a chemotherapy treatment complementary to surgery, either because they are cured with surgical treatment alone or because they are unreceptive to chemotherapy treatment. Tumors not susceptible to complete surgical resection are considered incurable. In this context, chemotherapy has shown to improve in a modest but significant manner patients' quality of life and life expectancy, although at the expense of considerable financial cost and of non-negligible toxicity. Standard advanced colorectal cancer treatment consists of different combinations of fluoropyrimidines with oxaliplatin or irinotecan. These therapeutic schemes induce objective tumor responses in 40-60% of the patients with median survival of about 20 months. Over the past decade, various drugs, including drugs directed against endothelial growth factor or VEGF (bevacizumab, aflibercept) or epidermal growth factor receptor or EGFR (cetuximab, panitumumab), have been incorporated into the therapeutic arsenal with promising results. Nevertheless, despite these advancements most patients with unresectable disease eventually die due to tumor progression with a median survival of 20-24 months in the best case scenario (Vieitz et al., 2011. Clin. Transl. Oncol. 13(11), 798-804; Garcia-Carbonero et al. 2010. Clin. Transl. Oncol., 12(11), 729-734).

[0003] The conventional prognosis factors used in conventional staging systems such as TNM, based essentially on the histopathological characteristics of the tumor and on its extent of spread in the organism, classify colorectal carcinoma patients into four large groups or stages of the disease: tumors limited to the colorectal mucosa or stage I, tumors infiltrating the entire intestinal wall or stage II, tumors invading the regional lymphatic nodes or stage III, and tumors with metastasis to distant organs or stage IV. Although these conventional classifications allow roughly differentiating subgroups of patients with different long-term prognosis, there is an enormous biological heterogeneity within said subgroups both in terms of survival and in terms of potential tumor response to chemotherapy treatment. In this context, the development of new biological markers which allow improving the ability to classify patients into prognosis/predictive subgroups is fundamental.

[0004] The elaboration of gene expression profiles using microarray technology shows a high potential in cancer research since it allows the simultaneous analysis and comparison of thousands of genes in various biological samples (for example, tumor samples) from patients affected by the same disease but with different clinical behavior (Nannini et al. 2009. Cancer Treat. Rev. 35(3), 201-209). The analysis of gene expression pattern has shown to improve diagnosis, prognosis and the predictive precision in different types of cancer (Liang et al. 2003. Nat. Rev. Cancer, 3, 869-876). For example, several studies have shown how the gene expression profiles discriminate between breast cancer with or without estrogen receptors, or between familial or sporadic breast cancer. Furthermore, previously unknown molecular subgroups have thus been described, such as the basal or luminal breast cancer cell subgroup, and have given rise to new proposals for classifying tumors of the central immune system or soft part sarcomas. However, the more appealing application from the clinical viewpoint is the possibility of differentiating between patient subgroups with different probabilities of cancer recurrence or death (Rosenwald et al., 2002. N. Engl. J. Med. 246, 1937-1947; van de Vijver He Y. D. et al., 2002. N. Engl. J. Med. 247, 1999-2009; Beer D. G. et al., 2002. Nat. Med. 8, 816-824), or with different probabilities of responding to a specific antineoplastic agent (Staunton J. E. et al., 2001. Proc. Natl. Acad. Sci 98, 10787-10792; Pusztai L. et al., 2003. The Oncologist, 8, 252-258).

[0005] It has been demonstrated in the last 2 decades that gene expression profile can differentiate between normal colonic tissue, benign adenomas and adenocarcinomas in different stages of spread of the disease, and the risk of developing CRC depending on normal colonic tissue analysis, as well as the probability of recurrence after a CRC surgical resection can also be determined (Bertucci et al., 2004. Oncogene 23, 1377-1391; Bandrés et al., 2007. Oncology Reports 17, 1089-1094). However, there has been little research on the value of this technology as a predictor of colon cancer response to chemotherapy.

[0006] Treatments for advanced CRC have limited efficacy, are costly and are not without risks for the patient. Based on the foregoing, it is fundamental to develop biomarkers which allow predicting prospectively which patients will respond to the treatment. On one hand, providing tools which allow identifying a priori those patients who will not benefit from a specific medical treatment would prevent the patient from suffering toxicity and from investing the money and time that it entails for receiving said treatment, while at the same time enable said patient to receive an alternative treatment with more chances of success. On the other hand, identification of biological markers predictive of tumor response can provide fundamental information concerning the molecular mechanisms determining and regulating said response and facilitate discovery of ways for manipulating the response which allow maximizing the therapeutic effect. In this context, microarray study of the gene expression pattern in patients with advanced CRC treated with chemotherapy in function of their response to same could facilitate the development of a genetic signature with unquestionable clinical usefulness.

### BRIEF DESCRIPTION OF THE INVENTION

[0007] A first aspect of the invention relates to the use of any of AQP, CLEC3B, DCK, DEFA5, DNAJC3, FBLIM1, GAS7, IGFBP4, KSR1, LONP1, MTHFD1L, NAV1, NIPBL, PALM2, PCDHGC3, PROS1, RARA, RSF1, TENC1, TGFBR3, TRAK2, VSNL1, WHSC1L1, WWC2, FAF1, FBXO9, KIAA1033, N4BP2L1, SLC12A, STARD13 and RB1CC1 genes, or any of the combinations thereof for predicting the response to chemotherapy treatment in an individual suspected of suffering from colorectal cancer or diagnosed with colorectal cancer. Another aspect of the invention relates to a method for obtaining useful data for predicting the response to chemotherapy treatment in an individual suspected of suffering from colorectal cancer or diagnosed with colorectal cancer, which comprises:
[0008] a) obtaining an isolated biological sample comprising tumor cells from the individual, and
[0009] b) detecting the amount of expression product of any of AQP, CLEC3B, DCK, DEFA5, DNAJC3, FBLIM1, GAS7, IGFBP4, KSR1, LONP1, MTHFD1L, NAV1, NIPBL, PALM2, PCDHGC3, PROS1, RARA, RSF1, TENC1, TGFBR3, TRAK2, VSNL1, WHSC1L1, WWC2, FAF1, FBXO9, KIAA1033, N4BP2L1, SLC12A, STARD13 and RB1CC1 genes, or any of the combinations thereof in the isolated sample of (a).

[0010] In a preferred embodiment, the first method of the invention further comprises:
[0011] c) comparing the expression levels of AQP, CLEC3B, DCK, DEFA5, DNAJC3, FBLIM1, GAS7, IGFBP4, KSR1, LONP1, MTHFD1L, NAV1, NIPBL, PALM2, PCDHGC3, PROS1, RARA, RSF1, TENC1, TGFBR3, TRAK2, VSNL1, WHSC1L1, WWC2, FAF1, FBXO9, KIAA1033, N4BP2L1, SLC12A, STARD13 and RB1CC1 genes in the sample obtained in (a) with the amount of expression detected for said genes in a reference population of individuals with a known pathological response.

[0012] Another aspect of the invention relates to a method for predicting or for the prognosis of the response to chemotherapy treatment in an individual suspected of suffering from colorectal cancer or diagnosed with colorectal cancer, comprising steps (a)-(c) of the first method of the invention, and further comprises:
[0013] d) including the individual having an expression level of AQP, CLEC3B, DCK, DEFA5, DNAJC3, FBLIM1, GAS7, IGFBP4, KSR1, LONP1, MTHFD1L, NAV1, NIPBL, PALM2, PCDHGC3, PROS1, RARA, RSF1, TENC1, TGFBR3, TRAK2, VSNL1, WHSC1L1, WWC2, FAF1, FBXO9, KIAA1033, N4BP2L1, SLC12A, STARD13 and RB1CC1 genes significantly greater than the expression levels of the same genes in a reference population, in the group of individuals responding to the colorectal cancer therapy.

[0014] In a preferred embodiment of this aspect of the invention, the biological sample isolated from an individual of step (a) used for determining the expression levels of AQP, CLEC3B, DCK, DEFA5, DNAJC3, FBLIM1, GAS7, IGFBP4, KSR1, LONP1, MTHFD1L, NAV1, NIPBL, PALM2, PCDHGC3, PROS1, RARA, RSF1, TENC1, TGFBR3, TRAK2, VSNL1, WHSC1L1, WWC2, FAF1, FBXO9, KIAA1033, N4BP2L1, SLC12A, STARD13 and RB1CC1 genes is obtained from the colorectal tumor tissue of the patient.

[0015] In another preferred embodiment of the invention, the determination of the expression level of genes does not need to be limited in a particular manner and can be selected from a genetic profiling method, such as a microarray, and/or a method comprising PCR (polymerase chain reaction), such as real time PCR and/or Northern blot.

[0016] More preferably, the expression product of AQP, CLEC3B, DCK, DEFA5, DNAJC3, FBLIM1, GAS7, IGFBP4, KSR1, LONP1, MTHFD1L, NAV1, NIPBL, PALM2, PCDHGC3, PROS1, RARA, RSF1, TENC1, TGFBR3, TRAK2, VSNL1, WHSC1L1, WWC2, FAF1, FBXO9, KIAA1033, N4BP2L1, SLC12A, STARD13 and RB1CC1 genes is detected by means of real time quantitative PCR.

[0017] In another even more preferred embodiment of this aspect of the invention, the expression product of AQP, CLEC3B, DCK, DEFA5, DNAJC3, FBLIM1, GAS7, IGFBP4, KSR1, LONP1, MTHFD1L, NAV1, NIPBL, PALM2, PCDHGC3, PROS1, RARA, RSF1, TENC1, TGFBR3, TRAK2, VSNL1, WHSC1L1, WWC2, FAF1, FBXO9, KIAA1033, N4BP2L1, SLC12A, STARD13 and RB1CC1 genes is detected by means of microarrays.

[0018] In a preferred embodiment of this aspect of the invention, the chemotherapy treatment comprises the use of platinum-based compounds, topoisomerase I-inhibiting compounds, pyrimidine analog compounds, or any of the combinations thereof. More preferably, the platinum-based compound is oxaliplatin, the topoisomerase I inhibitor is irinotecan, and the pyrimidine analog is 5-fluorouracil.

[0019] A preferred embodiment of this aspect of the invention comprises performing at least twice the sequence of steps (a)-(b) of the method of the invention on biological samples from one and the same individual isolated at different times. More preferably, the samples are obtained before and after treatment or from a chemotherapy treatment cycle.

[0020] Another aspect of the present invention relates to a kit or device, hereinafter kit or device of the invention, comprising the elements necessary for analyzing the amount of the expression product of AQP, CLEC3B, DCK, DEFA5, DNAJC3, FBLIM1, GAS7, IGFBP4, KSR1, LONP1, MTHFD1L, NAV1, NIPBL, PALM2, PCDHGC3, PROS1, RARA, RSF1, TENC1, TGFBR3, TRAK2, VSNL1, WHSC1L1, WWC2, FAF1, FBXO9, KIAA1033, N4BP2L1, SLC12A, STARD13 and RB1CC1 genes.

[0021] Another aspect of the invention relates to a microarray, hereinafter microarray of the invention, comprising oligonucleotides or single-channel microarrays designed based on a known sequence or an mRNA of AQP, CLEC3B, DCK, DEFA5, DNAJC3, FBLIM1, GAS7, IGFBP4, KSR1, LONP1, MTHFD1L, NAV1, NIPBL, PALM2, PCDHGC3, PROS1, RARA, RSF1, TENC1, TGFBR3, TRAK2, VSNL1, WHSC1L1, WWC2, FAF1, FBXO9, KIAA1033, N4BP2L1, SLC12A, STARD13 and RB1CC1 genes.

[0022] More preferably, the sequence of AQP, CLEC3B, DCK, DEFA5, DNAJC3, FBLIM1, GAS7, IGFBP4, KSR1, LONP1, MTHFD1L, NAV1, NIPBL, PALM2, PCDHGC3, PROS1, RARA, RSF1, TENC1, TGFBR3, TRAK2, VSNL1, WHSC1L1, WWC2, FAF1, FBXO9, KIAA1033, N4BP2L1, SLC12A, STARD13 and RB1CC1 genes is the corresponding nucleotide sequence which is selected from SEQ ID NO: 1 to SEQ ID NO: XX.

[0023] Another aspect of the invention relates to the use of the kit or device of the invention or of the microarray for obtaining useful data for predicting or for the prognosis of the response to treatment in colorectal cancer patients.

### DESCRIPTION OF THE INVENTION

[0024] The present invention provides a method for obtaining useful data for predicting the response of a human subject with colorectal cancer to chemotherapy treatment, which allows establishing groups of patients affected by the same disease but with different clinical behavior. It relates to an easy and reliable in vitro method and tools useful for this objective, such as detection kits, devices or systems which can be used for carrying out the methods of the invention. An additional objective of the present invention lies in providing the suitable medication for an individual patient suffering from colorectal cancer based on predicting the success of the treatment.

[0025] Colorectal cancer chemotherapy treatment can consist of, but is not restricted to, the administration, in combination or alone, of medicinal products such as capecitabine, floxuridine, fluorouracil, oxaliplatin, irinotecan, etc.

[0026] Therefore, a first aspect of the invention relates to the use of any of the AQP, CLEC3B, DCK, DEFA5, DNAJC3, FBLIM1, GAS7, IGFBP4, KSR1, LONP1, MTHFD1L, NAV1, NIPBL, PALM2, PCDHGC3, PROS1, RARA, RSF1, TENC1, TGFBR3, TRAK2, VSNL1, WHSC1L1, WWC2, FAF1, FBXO9, KIAA1033, N4BP2L1, SLC12A, STARD13 and RB1CC1 genes, or any of the combinations thereof for predicting or for the prognosis of the response to chemotherapy treatment in an individual suspected of suffering from colorectal cancer or diagnosed with colorectal cancer.

[0027] Another aspect of the invention relates to the simultaneous use of AQP, CLEC3B, DCK, DEFA5, DNAJC3, FBLIM1, GAS7, IGFBP4, KSR1, LONP1, MTHFD1L, NAV1, NIPBL, PALM2, PCDHGC3, PROS1, RARA, RSF1, TENC1, TGFBR3, TRAK2, VSNL1, WHSC1L1, WWC2, FAF1, FBXO9, KIAA1033, N4BP2L1, SLC12A, STARD13 and RB1CC1 genes for predicting the response to chemotherapy treatment in an individual suspected of suffering from colorectal cancer or diagnosed with colorectal cancer. However, the independent use of any of them or any of the combinations thereof may be sufficient to evaluate the response and/or tracking of said disease.

[0028] In a preferred embodiment of this aspect of the invention, the response to treatment is a response to tumor load reduction. In an alternative embodiment, the response to treatment is an improvement or absence of deterioration in the tumor stage. In another embodiment, the response to treatment is a clinical result, such as the progression-free survival or overall survival.

[0029] Method for Obtaining Useful Data and Method for Predicting the Response to Treatment of Colorectal Cancer

[0030] Another aspect of the invention relates to a method for obtaining useful data, hereinafter the first method of the invention, for predicting or for the prognosis of the response to chemotherapy treatment in an individual suspected of suffering from colorectal cancer or diagnosed with colorectal cancer, comprising:
[0031] a) obtaining an isolated biological sample comprising tumor cells from the individual, and
[0032] b) detecting the amount of expression product of any of AQP, CLEC3B, DCK, DEFA5, DNAJC3, FBLIM1, GAS7, IGFBP4, KSR1, LONP1, MTHFD1L, NAV1, NIPBL, PALM2, PCDHGC3, PROS1, RARA, RSF1, TENC1, TGFBR3, TRAK2, VSNL1, WHSC1L1, WWC2, FAF1, FBXO9, KIAA1033, N4BP2L1, SLC12A, STARD13 and RB1CC1 genes, or any of the combinations thereof in the isolated sample of (a).

[0033] Although the detection of the amount of expression product of any of the genes or of any of the combinations thereof can be used for predicting or for the prognosis of the response to chemotherapy treatment, in a preferred embodiment, the detection of the amount of expression product of the genes of step (b) is done simultaneously.

[0034] In another preferred embodiment, the first method of the invention further comprises:
[0035] c) comparing the expression levels of AQP, CLEC3B, DCK, DEFA5, DNAJC3, FBLIM1, GAS7, IGFBP4, KSR1, LONP1, MTHFD1L, NAV1, NIPBL, PALM2, PCDHGC3, PROS1, RARA, RSF1, TENC1, TGFBR3, TRAK2, VSNL1, WHSC1L1, WWC2, FAF1, FBXO9, KIAA1033, N4BP2L1, SLC12A, STARD13 and RB1CC1 genes in the sample obtained in (a) with the amount of expression detected for said genes in a reference population of individuals with a known pathological response.

[0036] Another aspect of the invention relates to a method for predicting or for the prognosis of the response to chemotherapy treatment in an individual suspected of suffering from colorectal cancer or diagnosed with colorectal cancer, hereinafter the second method of the invention, comprising steps (a)-(c) of the first method of the invention, and further comprises:
[0037] d) including the individual having an expression level of AQP, CLEC3B, DCK, DEFA5, DNAJC3, FBLIM1, GAS7, IGFBP4, KSR1, LONP1, MTHFD1L, NAV1, NIPBL, PALM2, PCDHGC3, PROS1, RARA, RSF1, TENC1, TGFBR3, TRAK2, VSNL1, WHSC1L1, WWC2, FAF1, FBXO9, KIAA1033, N4BP2L1, SLC12A, STARD13 and RB1CC1 genes significantly greater than the expression levels of the same genes in a reference population, in the group of individuals responding to the colorectal cancer chemotherapy.

[0038] Table 1 shows the expression levels obtained for said genes:

TABLE 1
Expression levels in tumor cells from responsive colorectal cancer patients.

| Gene | Fold change in | | Gene | Nucleotide | Amino acid |
|---|---|---|---|---|---|
| name | expression level | Description | ID | sequences | sequences |
| AQP1 | 2.30 | aquaporin 1 | 358 | SEQ ID NO: 1- | SEQ ID NO: 83- |
| | | | | SEQ ID NO: 4 | SEQ ID NO: 86 |
| CLEC3B | 3.06 | C-type lectin domain | 7123 | SEQ ID NO: 5 | SEQ ID NO: 87 |
| | | family 3, member B | | | |
| DCK | 1.85 | deoxycytidine kinase | 1633 | SEQ ID NO: 6- | SEQ ID NO: 88- |
| | | | | SEQ ID NO: 7 | SEQ ID NO: 89 |
| DEFA5 | 3.03 | defensin, alpha 5, Paneth | 1670 | SEQ ID NO: 49 | SEQ ID NO: 131 |
| | | cell-specific | | | |
| DNAJC3 | 2.68 | DnaJ (Hsp40) homolog, | 5611 | SEQ ID NO: 50 | SEQ ID NO: 132 |
| | | subfamily C, member 3 | | | |
| FBLIM1 | 1.93 | filamin binding LIM protein 1 | 54751 | SEQ ID NO: 13- | SEQ ID NO: 95- |
| | | | | SEQ ID NO: 15 | SEQ ID NO: 97 |
| GAS7 | 2.00 | growth arrest-specific 7 | 8522 | SEQ ID NO: 16- | SEQ ID NO: 98- |
| | | | | SEQ ID NO: 19 | SEQ ID NO: 101 |
| IGFBP4 | 1.74 | insulin-like growth factor | 3487 | SEQ ID NO: 20 | SEQ ID NO: 102 |
| | | binding protein 4 | | | |
| KSR1 | 2.00 | kinase suppressor of ras 1 | 8844 | SEQ ID NO: 51 | SEQ ID NO: 133 |
| LONP1 | 1.74 | Ion peptidase 1, mitochondrial | 9361 | SEQ ID NO: 52 | SEQ ID NO: 134 |
| MTHFD1L | 1.89 | methylenetetrahydrofolate | 25902 | SEQ ID NO: 53- | SEQ ID NO: 135- |
| | | dehydrogenase (NADP + | | SEQ ID NO: 56 | SEQ ID NO: 138 |
| | | dependent) 1-like | | | |
| NAV1 | 1.84 | neuron navigator 1 | 89796 | SEQ ID NO: 21- | SEQ ID NO: 103- |
| | | | | SEQ ID NO: 22 | SEQ ID NO: 104 |
| NIPBL | 2.07 | Nipped-B homolog | 25836 | SEQ ID NO: 57- | SEQ ID NO: 139- |
| | | | | SEQ ID NO: 58 | SEQ ID NO: 140 |
| PALM2 | 2.30 | PALM2-AKAP2 readthrough | 445815 | SEQ ID NO: 59- | SEQ ID NO: 141- |
| | | | | SEQ ID NO: 60 | SEQ ID NO: 142 |
| PCDHGC3 | 1.99 | protocadherin gamma | 5098 | SEQ ID NO: 23- | SEQ ID NO: 105- |
| | | subfamily C, 3 | | SEQ ID NO: 29 | SEQ ID NO: 121 |
| PROS1 | 2.09 | protein S (alpha) | 5627 | SEQ ID NO: 8 | SEQ ID NO: 90 |
| RARA | 1.95 | retinoic acid | 5914 | SEQ ID NO: 40- | SEQ ID NO: 122- |
| | | receptor, alpha | | SEQ ID NO: 43 | SEQ ID NO: 125 |
| RSF1 | 1.74 | remodeling and spacing factor 1 | 51773 | SEQ ID NO: 44 | SEQ ID NO: 126 |
| TENC1 | 1.92 | tensin-like C1 domain containing | 23371 | SEQ ID NO: 45- | SEQ ID NO: 127- |
| | | phosphatase (tensin 2) | | SEQ ID NO: 47 | SEQ ID NO: 129 |
| TGFBR3 | 2.22 | transforming growth factor, | 7049 | SEQ ID NO: 10- | SEQ ID NO: 92- |
| | | beta receptor III | | SEQ ID NO: 12 | SEQ ID NO: 94 |
| TRAK2 | 2.33 | trafficking protein, | 66008 | SEQ ID NO: 48 | SEQ ID NO: 130 |
| | | kinesin binding 2 | | | |
| VSNL1 | 1.95 | visinin-like 1 | 7447 | SEQ ID NO: 61 | SEQ ID NO: 143 |
| WHSC1L1 | 2.17 | Wolf-Hirschhorn syndrome | 54904 | SEQ ID NO: 9 | SEQ ID NO: 91 |
| | | candidate 1-like 1 | | | |
| WWC2 | 1.91 | WW and C2 domain containing 2 | 80014 | SEQ ID NO: 62 | SEQ ID NO: 144 |
| FAF1 | −1.01 | Fas (TNFRSF6) associated factor | 11124 | SEQ ID NO: 63 | SEQ ID NO: 145 |
| FBXO9 | −1.08 | F-box protein 9 | 26268 | SEQ ID NO: 64- | SEQ ID NO: 146- |
| | | | | SEQ ID NO: 66 | SEQ ID NO: 148 |
| KIAA1033 | −1.11 | WASH complex subunit 7 | 23325 | SEQ ID NO: 67 | SEQ ID NO: 149 |
| N4BP2L1 | −1.02 | NEDD4 binding protein 2-like 1 | 90634 | SEQ ID NO: 68- | SEQ ID NO: 150- |
| | | | | SEQ ID NO: 69 | SEQ ID NO: 151 |
| SLC12A | −1.03 | Solute carrier family 12 | 6558 | SEQ ID NO: 70- | SEQ ID NO: 152- |
| | | (sodium/potassium/chloride | | SEQ ID NO: 74 | SEQ ID NO: 156 |
| | | transporters), member 2 | | | |
| STARD13 | −1.72 | StAR-related lipid transfer | 90627 | SEQ ID NO: 75- | SEQ ID NO: 157- |
| | | (START) domain containing 13 | | SEQ ID NO: 80 | SEQ ID NO: 162 |
| RB1CC1 | −1.04 | RB1-inducible coiled-coil 1 | 9821 | SEQ ID NO: 81- | SEQ ID NO: 162- |
| | | | | SEQ ID NO: 82 | SEQ ID NO: 164 |

[0039] In the context of the present invention, the AQP, CLEC3B, DCK, DEFA5, DNAJC3, FBLIM1, GAS7, IGFBP4, KSR1, LONP1, MTHFD1L, NAV1, NIPBL, PALM2, PCDHGC3, PROS1, RARA, RSF1, TENC1, TGFBR3, TRAK2, VSNL1, WHSC1L1, WWC2, FAF1, FBXO9, KIAA1033, N4BP2L1, SLC12A, STARD13 and RB1CC1 genes are also defined by a nucleotide or polynucleotide sequence constituting the coding sequence of the proteins listed, respectively, in the SEQ ID listed in Table 1, and would comprise many variants originating from:
[0040] a) nucleic acid molecules encoding a polypeptide comprising the amino acid sequence of the SEQ ID listed in Table 1,
[0041] b) nucleic acid molecules the complementary strand of which hybridizes with the polynucleotide sequence of a),
[0042] c) nucleic acid molecules the sequence of which differs from a) and/or b) due to genetic code degeneration,
[0043] d) nucleic acid molecules encoding a polypeptide comprising the amino acid sequence with an identity of at least 80%, 90%, 95%, 98% or 99% with the SEQ ID listed in Table 1, respectively, and in which the polypeptide encoded by said nucleic acids has the activity and structural characteristics of proteins AQP, CLEC3B, DCK, DEFA5, DNAJC3, FBLIM1, GAS7, IGFBP4, KSR1, LONP1, MTHFD1L, NAV1, NIPBL, PALM2, PCDHGC3, PROS1, RARA, RSF1, TENC1, TGFBR3, TRAK2, VSNL1, WHSC1L1, WWC2, FAF1, FBXO9, KIAA1033, N4BP2L1, SLC12A, STARD13 and RB1CC1. Among said nucleic acid molecules, the one listed in the SEQ ID indicated in Table 1 is included.

[0044] The subjects whose response is predicted are human subjects suspected of suffering from and/or have preferably been diagnosed with colorectal cancer preferably, but not limited to, advanced stages of the disease (stage IV of the TNM classification). The terms “individual”, “human subject”, “subject” and “patient” are therefore used interchangeably in this specification. As it is used herein, the term “individual” refers to animals, preferably mammals, and more preferably, humans. The term “individual” does not seek to be limiting in any aspect, the individual being able to be of any age, sex and having any physical condition.

[0045] Also as it is used herein, “one or more” includes one and the individualized specification of any number that is more than one, such as two, three, four, five, six, etc. As it is used herein, “more than one” or “some” includes the individualized specification of any number that is more than one, such as two, three, four, five, six, etc.

[0046] Steps (b) and/or (c) of the methods described above can be completely or partially automated, for example, by means of a piece of robotic sensing equipment for the detection of the amount of expression product of the genes in step (b) or the computerized comparison in step (c). In addition to the steps specified above, it can comprise other additional steps, for example, steps relating to sample pre-treatment or evaluation of the results obtained by means of these methods. For example, the method for predicting the response to treatment of a colorectal cancer patient can include an additional step consisting of generating a report about the results of the patient gene profile, including the probability of response to treatment of said patient diagnosed with colorectal cancer.

[0047] In a preferred embodiment of this aspect of the invention, the biological sample isolated from an individual of step (a) used for determining the expression levels of AQP, CLEC3B, DCK, DEFA5, DNAJC3, FBLIM1, GAS7, IGFBP4, KSR1, LONP1, MTHFD1L, NAV1, NIPBL, PALM2, PCDHGC3, PROS1, RARA, RSF1, TENC1, TGFBR3, TRAK2, VSNL1, WHSC1L1, WWC2, FAF1, FBXO9, KIAA1033, N4BP2L1, SLC12A, STARD13 and RB1CC1 genes is obtained from the colorectal tumor tissue of the patient.

[0048] The studies conducted by the authors of the present invention have allowed obtaining information about gene expression patterns in patients affected with colorectal cancer who are responsive to treatment compared to non-responsive subjects. This has allowed obtaining a model of significant modifications defining the sensitivity to chemotherapy treatment in this type of pathology.

[0049] The amount of the expression product of the genes can be detected by any means known in the state of the art. The authors of the present invention have demonstrated that detecting the amount or the concentration of these expression products in a semi-quantitative or quantitative manner allow differentiating between the responsive individual with colorectal cancer and the non-responsive individual. The detected amount of the expression product of the genes could establish a differential profile in individuals affected by colorectal cancer, which allows subclassifying them depending on their sensitivity to chemotherapy.

[0050] The amount or concentration can be measured directly or indirectly, preferably in a semi-quantitative or quantitative manner. Direct measurement refers to measurement of the amount or concentration of the expression product of the genes based on a signal which is obtained directly from the transcripts of said genes, or from the proteins translated from said genes, and which is directly correlated with the number of RNA molecules or proteins produced by the genes. Said signal which can also be referred to as intensity signal can be obtained, for example, by measuring an intensity value of a chemical or physical property of said products. Indirect measurement includes the measurement obtained from a secondary component or a biological measurement system (for example, the measurement of cell responses, ligands, “labels” or enzyme reaction products).

[0051] As it is used herein, the term “amount” refers, but is not limited, to the absolute or relative amount of the expression products of the genes, as well as to any other value or parameter related thereto or can be derived therefrom. Said values or parameters comprise signal intensity values obtained from any of the physical or chemical properties of said expression products obtained by means of direct measurement. Additionally, said values or parameters include all those obtained by means of indirect measurement, for example, any of the measurement systems described in another part of the present document.

[0052] As it is used herein, the term “comparison” refers, but is not limited, to the comparison of the amount of the expression products of AQP, CLEC3B, DCK, DEFA5, DNAJC3, FBLIM1, GAS7, IGFBP4, KSR1, LONP1, MTHFD1L, NAV1, NIPBL, PALM2, PCDHGC3, PROS1, RARA, RSF1, TENC1, TGFBR3, TRAK2, VSNL1, WHSC1L1, WWC2, FAF1, FBXO9, KIAA1033, N4BP2L1, SLC12A, STARD13 and RB1CC1 genes of the biological sample to be analyzed, also referred to as target biological sample, with an amount of the expression products of AQP, CLEC3B, DCK, DEFA5, DNAJC3, FBLIM1, GAS7, IGFBP4, KSR1, LONP1, MTHFD1L, NAV1, NIPBL, PALM2, PCDHGC3, PROS1, RARA, RSF1, TENC1, TGFBR3, TRAK2, VSNL1, WHSC1L1, WWC2, FAF1, FBXO9, KIAA1033, N4BP2L1, SLC12A, STARD13 and RB genes of one or more desirable reference samples described in another part of the present description. The reference sample can be analyzed, for example, simultaneously or consecutively, together with the target biological sample. The comparison described in section (c) of the method of the present invention can be performed manually or assisted by a computer.

[0053] The expression products of the genes will give a specific gene expression profile. “Gene expression profile” is understood as the gene profile obtained after quantifying the mRNA and/or protein produced by the genes of interest or biomarkers, i.e., by the AQP, CLEC3B, DCK, DEFA5, DNAJC3, FBLIM1, GAS7, IGFBP4, KSR1, LONP1, MTHFD1L, NAV1, NIPBL, PALM2, PCDHGC3, PROS1, RARA, RSF1, TENC1, TGFBR3, TRAK2, VSNL1, WHSC1L1, WWC2, FAF1, FBXO9, KIAA1033, N4BP2L1, SLC12A, STARD13 and RB1CC1 genes in an isolated biological sample. The expression profile of the genes is preferably established by determining the mRNA level derived from their transcription, before extraction of the total RNA present in the isolated biological sample, which can be performed by means of protocols known in the state of the art. The mRNA level derived from the transcription of AQP, CLEC3B, DCK, DEFA5, DNAJC3, FBLIM1, GAS7, IGFBP4, KSR1, LONP1, MTHFD1L, NAV1, NIPBL, PALM2, PCDHGC3, PROS1, RARA, RSF1, TENC1, TGFBR3, TRAK2, VSNL1, WHSC1L1, WWC2, FAF1, FBXO9, KIAA1033, N4BP2L1, SLC12A, STARD13 and RB1CC1 genes can determined, for example, although without limitation, by means of polymerase chain reaction (PCR) amplification, reverse transcription in combination with polymerase chain reaction (RT-PCR), quantitative RT-PCR, reverse transcription in combination with ligase chain reaction (RT-LCR), or any other nucleic acid amplification method; serial analysis of gene expression (SAGE, SuperSAGE); DNA chips prepared with oligonucleotides deposited by any mechanism; DNA microarrays prepared with oligonucleotides synthesized in situ by means of photolithography or by any other mechanism; in situ hybridization using specific probes labeled with any labeling method; by means of electrophoresis gels; by means of membrane transfer and hybridization with a specific probe; by means of nuclear magnetic resonance or any other imaging diagnostic technique using paramagnetic nanoparticles or any other type of detectable nanoparticles functionalized with antibodies or by any other means. The gene expression profile could also be obtained by means of detecting and/or quantifying the proteins product of the translation of the mRNA derived from the transcription of AQP, CLEC3B, DCK, DEFA5, DNAJC3, FBLIM1, GAS7, IGFBP4, KSR1, LONP1, MTHFD1L, NAV1, NIPBL, PALM2, PCDHGC3, PROS1, RARA, RSF1, TENC1, TGFBR3, TRAK2, VSNL1, WHSC1L1, WWC2, FAF1, FBXO9, KIAA1033, N4BP2L1, SLC12A, STARD13 and RB1CC1 genes, by means, for example, but without limitation, of immunodetection by Western blot. The expression of AQP, CLEC3B, DCK, DEFA5, DNAJC3, FBLIM1, GAS7, IGFBP4, KSR1, LONP1, MTHFD1L, NAV1, NIPBL, PALM2, PCDHGC3, PROS1, RARA, RSF1, TENC1, TGFBR3, TRAK2, VSNL1, WHSC1L1, WWC2, FAF1, FBXO9, KIAA1033, N4BP2L1, SLC12A, STARD13 and RB genes can be quantitatively detected, more preferably, by means of real time PCR (RT-PCR or RTqPCR). The real time detection of the amplified products can be carried out by means of using fluorescent molecules that are intercalated in the double-stranded DNA or by means of hybridization with different types of probes.

[0054] Therefore, in another preferred embodiment of the invention the detection of the expression level of the genes does not need to be limited in a particular manner and can be selected from a genetic profiling method, such as a microarray, and/or a method comprising PCR (polymerase chain reaction), such as real time PCR and/or Northern blot.

[0055] More preferably, the expression product of AQP, CLEC3B, DCK, DEFA5, DNAJC3, FBLIM1, GAS7, IGFBP4, KSR1, LONP1, MTHFD1L, NAV1, NIPBL, PALM2, PCDHGC3, PROS1, RARA, RSF1, TENC1, TGFBR3, TRAK2, VSNL1, WHSC1L1, WWC2, FAF1, FBXO9, KIAA1033, N4BP2L1, SLC12A, STARD13 and RB1CC1 genes is detected by means of real time quantitative PCR and is expressed as −ΔΔCt. Real time quantitative PCR (RQ-PCR) is a sensitive and reproducible gene expression quantification technique which can be used particularly for gene profile expression in cells and tissues. Any method can be used for evaluating the results of RT-PCR and the ΔΔCt method is preferred. The ΔΔCt method is described in detail in Livak et al. (Methods 2001, 25, 402-408). (Ct=Threshold values of the cycle). When carrying out the present invention to practice, the ΔΔCt method as described by Livak et al. (Methods 2001, 25:402-408) must preferably be used. The ΔΔCt method will involve a “sample from the control” and a “sample from the subject”. The “sample from the subject” is a sample originating from the subject to be analyzed. A target gene (hereinafter the gene of interest) and an endogenous control gene (as described below) are included in each sample for PCR amplification from aliquots (usually serial dilutions). Usually, several replicates of each diluted concentration are used to derive the amplification efficiency. PCR amplification efficiency can be defined as the percentage of amplification (from 0 to 1). Durante the qPCR reaction, a piece of software usually measures the number of cycles of each sample in which the fluorescence intersects an arbitrary line (indicative of PCR amplification), the threshold. This point of intersection is the Ct value. More diluted samples will intersect subsequent Ct values. To quantify the gene expression of a particular gene, the Ct of a nucleic acid originating from the gene of interest is subtracted from the Ct of the nucleic acid originating from the endogenous control in the same sample for normalizing variation in the amount and quality of RNA between different samples and obtaining the relative expression (with respect to the endogenous control) of each of the samples, the “sample from the subject” and the “sample from the control”. Optionally, this is carried out in duplicate, triplicate, quadruplicate and in a similar manner, respectively. A ΔCt value of the control can be suitably obtained by calculating the average of the ΔCt values obtained from samples of a control group consisting of a few individuals with which the values of the “sample from the subject” will be compared. The control group (from which the average value is calculated) consists of individuals suitable for the respective (comparison) purposes. From this disclosure, the skilled person will learn that a suitable control group is for a specific purpose. In a particular embodiment, the present invention can be carried out to practice omitting the determination of the ΔCt value of the control group, i.e., determining (only) the ΔCt value of the “sample from the subject” and then subsequently comparing this with the respective average ΔCt value of the control indicated in the examples.

[0056] In another still more preferred embodiment of this aspect of the invention, the expression product of AQP, CLEC3B, DCK, DEFA5, DNAJC3, FBLIM1, GAS7, IGFBP4, KSR1, LONP1, MTHFD1L, NAV1, NIPBL, PALM2, PCDHGC3, PROS1, RARA, RSF1, TENC1, TGFBR3, TRAK2, VSNL1, WHSC1L1, WWC2, FAF1, FBXO9, KIAA1033, N4BP2L1, SLC12A, STARD13 and RB1CC1 genes is detected by means of microarrays.

[0057] The reference amount is obtained from the values of constitutive expression of genes in a group of healthy individuals or of the expression of the genes in the group of individuals before being subjected to treatment.

[0058] The reference amount will be, for example, in the case of differentiating between patients affected by colorectal cancer responsive to treatment, the constitutive expression of the gene in a control group of non-responsive individuals.

[0059] On the other hand, the reference sample or samples can be, for example, obtained from tumor tissue of a colorectal cancer patient who did not respond to treatment.

[0060] In another preferred embodiment of this aspect of the present invention, the reference amount is obtained from a reference sample. The reference amount can also be obtained, for example, from the normal distribution limits of an amount found in samples obtained from a population of non-responsive individuals with colorectal cancer, by means of well known statistical techniques. In another preferred embodiment, the reference sample is obtained from the patients before and after treatment. Therefore, a preferred embodiment of this aspect of the invention comprises performing at least twice the sequence of steps (a)-(b) of the method of the invention on biological samples from one and the same individual isolated at different times. More preferably, the samples are obtained before and after treatment.

[0061] The inventors have demonstrated that the expression levels of one or more of these genes can be indicative of the response of a subject to treatment. In a preferred embodiment of this aspect of the invention, the response is a significant tumor load reduction evaluated using universal standard objective radiological criteria (RECIST criteria). In an alternative embodiment, the response is a clinical result, such as the tumor progression-free survival.

[0062] The evaluation of the complete response and/or partial response is an important factor for determining the stage of an individual patient. It is therefore necessary to estimate the total tumor load in the baseline value and use this as a comparative element for subsequent measurements that are usually carried out according to the RECIST criteria (version 1.1), Eisenhauer et al., 2009. Eur. J. Cancer, 45 (228-247), defined as follows:
[0063] 1. Complete response (CR): Disappearance of all measurable and evaluable evidence of the disease
[0064] 2. Partial response (PR): At least a 30% decrease in the sum of diameters of target lesions, taking as reference the baseline sum diameters.
[0065] 3. Progressive disease (PD): At least a 20% increase in the sum of diameters of target lesions, taking as reference the smallest sum on study (this includes the baseline sum if that is the smallest on study). In addition to the relative increase of 20%, the sum must also demonstrate an absolute increase of at least 5 mm. (Note: the appearance of one or more new lesions is also considered progression).
[0066] 4. Stable disease (SD): Neither sufficient shrinkage to qualify for PR nor sufficient increase to qualify for PD.

[0067] Throughout the present invention, the terms CR, PR, PD and SD are defined according to preceding definitions 1 to 4 taken from the revised RECIST Guidelines of Eisenhauer et al., 2009. Eur. J. Cancer, 45 228-247.

[0068] In another preferred embodiment, the neoadjuvant treatment comprises the use of radiotherapy. In another even more preferred embodiment, said treatment comprises administering chemotherapy with fluoropyrimidine-type compounds and an additional agent.

[0069] The chemotherapy, the response to which is to be predicted, comprises standard chemotherapy regimens in colorectal cancer treatment, fluoropyrimidine-based regimens. Chemotherapy is understood as cancer treatment with an antineoplastic drug or with a combination of said drugs. Without intending to be bound to any theory in particular, it is understood that chemotherapy usually acts by eliminating cells that divide rapidly, which is one of the main properties of most cancerous cells. For treatment of patients suffering from colorectal cancer, chemotherapy preferably comprises administering fluoropyrimidines which are thought to act like antimetabolites. The examples of fluoropyrimidine compounds are capecitabine, floxuridine and fluorouracil (5-FU), which is the most preferred one in the present invention. Said fluoropyrimidine can be administered alone or in combination with an additional agent, polychemotherapy being more effective in general although also more toxic. The additional agent can be a molecule capable of interacting with DNA, such as in inhibiting DNA synthesis and/or preventing DNA from unwinding. In a preferred embodiment of the present invention, the chemotherapy can comprise administering oxaliplatin and fluoropyrimidine, or irinotecan and fluoropyrimidine. The cytotoxicity of oxaliplatin (patent document U.S. Pat. No. 4,169,846) is thought to result in the inhibition of DNA synthesis in cancerous cells. In vivo studies have shown that oxaliplatin has anti-tumor activity against colon carcinoma due to its (undirected) cytotoxic effect. Irinotecan on the other hand is a semi-synthetic analog of natural alkaloid camptothecin, which is thought to act by preventing the unwinding of DNA through inhibition of topoisomerase 1. Oxaliplatin and irinotecan are therefore thought to exert their function intervening with the DNA.

[0070] Therefore, in an even more preferred embodiment the chemotherapy is a therapy which comprises administering platinum-based compounds, topoisomerase I-inhibiting compounds, a pyrimidine analog compound, or any of the combinations thereof. More preferably, the platinum-based compound is oxaliplatin, the topoisomerase I inhibitor is irinotecan, and the pyrimidine analog is 5-fluorouracil.

[0071] Another aspect of the invention relates to a method for tracking the progression of colorectal cancer in an individual, hereinafter third method of the invention, which comprises performing at least twice the sequence of steps (a)-(b) according to the first or second method of the invention, on biological samples from one and the same individual isolated at different times.

[0072] Kit of the Invention

[0073] Another aspect of the present invention relates to a kit or device, hereinafter kit or device of the invention, comprising the elements necessary for analyzing the amount of the expression product of AQP, CLEC3B, DCK, DEFA5, DNAJC3, FBLIM1, GAS7, IGFBP4, KSR1, LONP1, MTHFD1L, NAV1, NIPBL, PALM2, PCDHGC3, PROS1, RARA, RSF1, TENC1, TGFBR3, TRAK2, VSNL1, WHSC1L1, WWC2, FAF1, FBXO9, KIAA1033, N4BP2L1, SLC12A, STARD13 and RB1CC1 genes.

[0074] The kit is based on the predictive power of the method of the present invention. As mentioned above, the reference indicator value for the lack of response of each specific gene can be determined before carrying out the method of the present invention. In the particular case of the kit, the reference indicator value for the lack of response (and/or a reference indicator value for the response) can be provided. With the aid of the kit, the expression of each gene can be calculated, i.e., with respect to the control samples provided by way of examples above. The control can also therefore be comprised in the kit.

[0075] The kit of the invention more preferably comprises means necessary for comparing the amount detected in step (b) with a reference amount. Said kit can contain all those reagents necessary for analyzing the amount of the expression product of AQP, CLEC3B, DCK, DEFA5, DNAJC3, FBLIM1, GAS7, IGFBP4, KSR1, LONP1, MTHFD1L, NAV1, NIPBL, PALM2, PCDHGC3, PROS1, RARA, RSF1, TENC1, TGFBR3, TRAK2, VSNL1, WHSC1L1, WWC2, FAF1, FBXO9, KIAA1033, N4BP2L1, SLC12A, STARD13 and RB1CC1 genes by means of any of the methods described above in this document. The kit can further include, without any type of limitation, buffers, agents to prevent contamination, protein degradation inhibitors, etc. On the other hand, the kit can include all the supports and containers necessary for putting it into practice and optimization. Preferably, the kit further comprises the instructions for carrying out any of the methods of the invention.

[0076] More preferably, the kit or device of the invention comprises the primers and probes obtained from the gene sequences of the invention, such as those which are also described in Table 1. Since a single gene may be useful for predicting or for the prognosis of the response to treatment in colorectal cancer patients, the kit can contain the probe/probes and primers useful for quantifying the expression of said gene, or any of the combinations of AQP, CLEC3B, DCK, DEFA5, DNAJC3, FBLIM1, GAS7, IGFBP4, KSR1, LONP1, MTHFD1L, NAV1, NIPBL, PALM2, PCDHGC3, PROS1, RARA, RSF1, TENC1, TGFBR3, TRAK2, VSNL1, WHSC1L1, WWC2, FAF1, FBXO9, KIAA1033, N4BP2L1, SLC12A, STARD13 and RB1CC1 genes.

[0077] In particular embodiments, the kit is selected from (a) a kit suitable for PCR, (b) a kit suitable for Northern blot and (c) a kit suitable for microarray analysis. Any of two or more of these embodiments can be combined such that the kit can comprise, for example, both of (a) and (c).

[0078] In the case of (a) a kit suitable for PCR, this PCR is usually real time quantitative PCR (RQ-PCR), a sensitive and reproducible gene expression quantification technique. In this case, the kit preferably additionally comprises primers and probes and oligonucleotides/oligonucleotides of the kit. These reagents can be optionally comprised in the kit.

[0079] Northern blot involves the use of electrophoresis for separating RNA samples by size and the subsequent detection with oligonucleotides/oligonucleotides (hybridization probe) complementary with (part of) the target sequence of the RNA of interest.

[0080] It is also possible that the oligonucleotide/oligonucleotides are immobilized on spots on a (preferably solid) surface. In one of its embodiments, the kit comprises a microarray. An RNA microarray is an array on a solid substrate (typically a glass slide or a cell in a thin silicon film) that evaluates different large amounts of RNA that are detectable by specific probes immobilized on spots on a substrate solid. Each spot contains a specific nucleic acid sequence, usually a DNA sequence as probes (or indicators). Although the number of spots is not limited in any way, there is a preferred embodiment in which the microarray is customized to the methods of the invention. In one embodiment, said customized array comprises fifty spots or less, such as thirty spots or less, including twenty spots or less.

[0081] Microarray of the Invention

[0082] Therefore, another aspect of the invention relates to a microarray, hereinafter microarray of the invention, comprising oligonucleotides or single-channel microarrays designed based on a known sequence or an mRNA of AQP, CLEC3B, DCK, DEFA5, DNAJC3, FBLIM1, GAS7, IGFBP4, KSR1, LONP1, MTHFD1L, NAV1, NIPBL, PALM2, PCDHGC3, PROS1, RARA, RSF1, TENC1, TGFBR3, TRAK2, VSNL1, WHSC1L1, WWC2, FAF1, FBXO9, KIAA1033, N4BP2L1, SLC12A, STARD13 and RB1CC1 genes. More preferably, the sequence of AQP, CLEC3B, DCK, DEFA5, DNAJC3, FBLIM1, GAS7, IGFBP4, KSR1, LONP1, MTHFD1L, NAV1, NIPBL, PALM2, PCDHGC3, PROS1, RARA, RSF1, TENC1, TGFBR3, TRAK2, VSNL1, WHSC1L1, WWC2, FAF1, FBXO9, KIAA1033, N4BP2L1, SLC12A, STARD13 and RB1CC1 genes is the nucleotide sequence indicated for each of them in Table 1, respectively.

[0083] The use of the kit is not particularly limited, although the use thereof is preferred in any of the methods of the invention or in any of the embodiments thereof. Therefore, another aspect of the invention relates to the use of the kit or device of the invention for obtaining useful data for the prognosis of or for predicting the response to neoadjuvant chemotherapy in individuals with colorectal cancer.

[0084] Another aspect of the invention relates to a computer readable storage medium comprising program instructions capable of making a computer carry out the steps of any of the methods of the invention (any of the first, second or third method of the invention).

[0085] Another aspect of the invention relates to a transmissible signal comprising program instructions capable of making a computer carry out the steps of any of the methods of the invention.

[0086] The terms “polynucleotide” and “nucleic acid” are used herein interchangeably, referring to polymeric forms of nucleotides of any length, both ribonucleotides (RNA) and deoxyribonucleotides (DNA). The terms “amino acid sequence”, “peptide”, “oligopeptide”, “polypeptide” and “protein” are used herein interchangeably and refer to a polymeric form of amino acids of any length, which can be coding or non-coding, chemically or biochemically modified.

[0087] Throughout the description and the claims the word “comprises” and variants thereof do not intend to exclude other technical features, supplements, components or steps. For persons skilled in the art, other objects, advantages and features of the invention will be inferred in part from the description and in part from the practice of the invention. The following examples and drawings are provided by way of illustration and they are not meant to limit the present invention.

### BRIEF DESCRIPTION OF THE DRAWINGS

[0088] In order to help better understand the features of the invention according to a preferred practical embodiment thereof and to complement this description, a set of illustrative and non-limiting drawings is attached as an integral part thereof. In these drawings:

[0089] FIG. 1 shows the supervised hierarchical cluster analysis showing the differentially expressed genes in patients who achieved an objective response to chemotherapy (Yes: CR and PR; blue) with respect to patients who do not respond to chemotherapy (No: SD or PD; red). The genes in red indicate overexpression and the genes in green indicate underexpression.

[0090] FIG. 2 shows the supervised hierarchical cluster analysis showing the differentially expressed genes in patients who achieved a progression-free survival (PFS) greater than the mean time of PFS (Yes; blue) compared to patients with PFS less than the mean (No; red). The genes in red indicate overexpression and the genes in green indicate underexpression.

[0091] FIG. 3 shows mean ΔCt values of genes validated in patients with an objective response to chemotherapy (Yes) compared to non-responsive patients (No). *p-value<0.05. **p-value<0.01. ***p-value<0.001. The data derived from RT-qPCR are presented as ΔCt values with higher values for lower RNA expression.

[0092] FIG. 4 shows the clinical result considering the progression-free survival (PFS) of patients using gene expression levels. The solid black line represents patients with a higher gene expression level (with respect to the mean). The discontinuous black line represents patients with lower gene expression levels.

[0093] FIG. 5 shows mean ΔCt values of genes validated in patients with progression-free survival (PFS) greater than the mean (11.53 months) [Yes] compared with patients with lower PFS [No]. *p-value<0.05; **p-value<0.01; ***p-value<0.001. The data derived from RT-qPCR are presented as ΔCt values with higher values for lower RNA expression.

### EXAMPLES OF THE INVENTION

[0094] The invention will be illustrated below by means of assays conducted by the inventors clearly showing the specificity and effectiveness of the methods of the invention for obtaining useful data in the prediction of the response to treatment of said disease.

[0095] Materials and Methods

[0096] The study protocol has been approved by the ethics committee of the participating centers and with a written consent form from all the patients. A total of 159 tumors from patients diagnosed with advanced CRC were used as training (n=40) and validation (n=119). Samples complying with the following criteria were included in the study: (1) confirmed primary diagnosis of CRC; (2) the patients were treated with at least one chemotherapy line for the advanced disease and the response was evaluated; (3) suitable frozen tissues available for molecular assays (a proportion of tumor cells >50% is required). The training set consisted of 40 CRC samples from Hospital Marqués de Valdecilla, Santander, Spain. The validation set consisted of 119 samples from 4 different hospitals (Hospital Virgen del Rocio of Seville (Spain), Hospital Virgen de la Victoria of Malaga (Spain), Hospital Virgen de la Merced of Osuna (Spain) and Hospital Marqués de Valdecilla of Santander (Spain), and 86 tumor samples (40 from the training set and 46 from recently treated CRC patients) were included and 33 normal tissue samples from CRC patients were used as controls. The distribution of the demographic and clinical-pathological characteristics of the initial and validation cohorts is shown in Table 2, and the histological characteristics of the tumor samples are outlined in Table 3. There were no significant differences between both groups.

TABLE 2
Demographic data, clinical characteristics and treatment in the training and validation sets

| | Training set | | Validation set | | |
|---|---|---|---|---|---|
| | (n = 40) | | (n = 86) | | |
| Characteristics | N (%) | | N (%) | | P |
| Age (years) | | | | | 0.417 |
| Median (range) | 61 | (47-79) | 65 | (42-80) | |
| Sex | | | | | 1.00 |
| Female | 16 | (40) | 33 | (38.4) | |
| Male | 24 | (60) | 53 | (61.6) | |
| Metastasis in the diagnosis | | | | | 0.625 |
| Yes | 34 | (85) | 69 | (80.3) | |
| No | 6 | (15) | 17 | (19.7) | |
| Metastasis/advanced disease | | | | | |
| Functional state | | | | | 0.306 |
| 0-1 | 40 | (100) | 82 | (95.3) | |
| 2 | 0 | (0) | 4 | (4.7) | |
| Laboratory parameters (Median (range)) | | | | | |
| CEA (ng/mL) | 62.5 | (1-4007) | 28 | (1-1448) | |
| Hemoglobin (g/dL) | 12 | (2-15) | 12 | (2-15) | |
| Alkaline phosphatase (IU/L) | 107 | (48-620) | 96 | (43-16189) | |
| Lactate dehydrogenase (IU/L) | 441 | (273-2692) | 355 | (109-2692) | |
| Initial chemotherapy (CT) regimens | | | | | |
| Oxaliplatin-based chemotherapy | | | | | |
| Oxaliplatin + FP | 18 | (45) | 39 | (45.4) | |
| Oxaliplatin + FP + AntiEGFR | 8 | (20) | 14 | (16.3) | |
| Oxaliplatin + FP + AntiEGFR/AntiVEGFR | 9 | (22.5) | 14 | (16.3) | |
| Irinotecan-based chemotherapy | | | | | |
| Irinotecan + FP | 0 | (0) | 9 | (10.5) | |
| Irinotecan + FP + AntiEGFR | 0 | (0) | 1 | (1.2) | |
| Irinotecan + FP + AntiEGFR + | 0 | (0) | 1 | (1.2) | |
| AntiEGFR/AntiVEGFR | | | | | |
| Triple (Oxaliplatin + Irinotecan + FP) | 5 | (12.5) | 4 | (4.6) | |
| Only FP | 0 | (0) | 3 | (3.4) | |
| Response | | | | | |
| Tumor response to initial CT | | | | | 0.441 |
| Yes (CR + PR) | 25 | (62.5) | 46 | (53.5) | |
| No (SD + PD) | 15 | (37.5) | 40 | (46.5) | |
| Tumor progression after initial CT | | | | | 0.068 |
| Yes | 27 | (67.5) | 71 | (82.6) | |
| No | 13 | (32.5) | 15 | (17.4) | |
| Surgical treatment of relapse or | | | | | 0.378 |
| metastasis with complete resection | | | | | |
| Yes | 12 | (30) | 19 | (22.1) | |
| No | 28 | (70) | 67 | (77.9) | |
| Result | | | | | |
| Tracking of living patients (months) | | | | | 0.586 |
| Median (range) | 31.9 | (12.9-77.57) | 30.8 | (5.50-77.57) | |
| Patient's condition during last contact | | | | | |
| Dead | 17 | (42.5) | 49 | (57) | |
| Living with tumor | 22 | (55) | 31 | (36) | |
| Living without tumor | 1 | (2.5) | 6 | (7) | |

CEA: carcinoembryonic antigen;
EGFR: epidermal growth factor receptor;
VEGF: vascular endothelial growth factor;
VEGFR: vascular endothelial growth factor receptor;
FP: fluoropyrimidines;
CR: complete response;
PR: partial response;
SD: stable disease;
PD: progressive disease.

TABLE 3
Characteristics of the tumors in the training and validation sets

| | Training set | | Validation set | | |
|---|---|---|---|---|---|
| | (n = 40) | | (n = 86) | | |
| Characteristics | N (%) | | N (%) | | P |
| Sample type | | | | | |
| Surgical part | 38 | (95) | 85 | (98.8) | |
| Endoscopic biopsy | 1 | (2.5) | 1 | (1.2) | |
| Others | 1 | (2.5) | 0 | (0) | |
| Tumor localization | | | | | |
| Location of the primary tumor | | | | | 0.834 |
| Colon | 28 | (70) | 62 | (72.1) | |
| Rectum | 12 | (30) | 24 | (27.9) | |
| Location of metastasis | | | | | |
| Liver | 33 | (82.5) | 57 | (66.3) | 0.062 |
| Lung | 12 | (30) | 22 | (25.6) | 0.668 |
| Peritoneal carcinomatosis | 6 | (15) | 16 | (18.6) | 0.802 |
| Others | 1 | (2.5) | 24 | (27.9) | |
| Histological characteristics | | | | | |
| Histology | | | | | 0.306 |
| Adenocarcinoma | 40 | (100) | 82 | (95.3) | |
| Mucin carcinoma | | | 4 | (4.7) | |
| Tumor differentiation | | | | | |
| Well differentiated | 14 | (35) | 38 | (44.2) | |
| Moderately differentiated | 8 | (20) | 28 | (32.6) | |
| Poorly differentiated | 15 | (37.5) | 15 | (17.4) | |
| Unknown | 3 | (7.5) | 5 | (5.8) | |
| Lymphovascular invasion | | | | | |
| Yes | 23 | (57.5) | 30 | (34.9) | |
| No | 3 | (7.5) | 15 | (17.4) | |
| Unknown | 14 | (35) | 41 | (47.7) | |
| Condition of K-ras | | | | | 0.338 |
| Wild-type | 25 | (62.5) | 45 | (52.3) | |
| Mutated | 15 | (37.5) | 41 | (47.7) | |

[0097] RNA Samples

[0098] The tumor tissue samples were ground to fine powder under liquid nitrogen using a pestle and mortar. Homogenization was achieved using QIAshredder homogenizers and the total RNA was extracted using the RNeasy mini kit (both kits from Qiagen Inc; Valencia, Calif., USA). The amount and quality of the RNA were estimated by means of agarose gel and spectrophotometric measurements. When it was not possible due to the small amount of RNA, they were estimated using Bioanalyzer 2100 (Eukaryote total RNA Nano or Pico kit: Agilent Technologies; Santa Clara, Calif., USA). From the 40 initial samples, RNA suitable in quality and amount could be obtained in 37 cases (93%).

[0099] Gene Expression Profile Microarray

[0100] The microarray experiments were developed using the Human Whole Genome U133 Plus 2.0 array (Affymetrix; Santa Clara, Calif., USA) containing 54675 probes of human genes. The double-stranded DNA was synthesized using One-Cycle cDNA Synthesis kit (Affymetrix), according to the manufacturer's recommendations. The total RNA (2 μg) was first reverse transcribed using a T-7 Oligo (dT) primer promoter for obtaining a single-stranded cDNA and then double-stranded cDNA which was purified with GeneChip Cleanup Module (Affymetrix) and used as a template in the subsequent in vitro transcription reaction. The labeled cRNA was also purified with GeneChip Cleanup Module and spectrophotometrically quantified. The purified cRNA was fragmented in fragmentation buffer (5× buffer: 200 mM Tris-acetate (pH 8.1)+500 mM KOAc+150 mM MgOAc) and hybridized to the microarray in 200 μl of hybridization solution containing 15 μg of labeled target in 1× Mes buffer (0.1 M Mes+1.0 M NaCl+20 mM ETA+0.01% Tween 20) and 0.1 mg/ml of herring sperm DNA, 10% DMSO, 0.5 mg/ml BSA, 50 pM of B2 control oligonucleotide and 1× eukaryotic hybridization controls (nioB, bioC, bioD, cre). Both the 82 control oligonucleotide and the eukaryotic hybridization controls were obtained from Affymetrix. The hybridization mixture was applied to Human Genome U133 Plus 2.0 array (Affymetrix), which includes the entire human genome with 54613 sets of probes. The arrays were placed in the 640 hybridization oven (Affymetrix) at 45° C. for 16 hours, rotating at 60 rpm. After hybridization, the arrays were washed with 6×SSPE-T (0.9 M NaCl+60 mM NaH₂PO₄+6 mM AEDT+0.01% Tween 20) at 30° C. over a fluid surface (FS400 Affymetrix) in 10 cycles of 2 mixes per cycle, and then with 0.1 M Mes+0.1 M NaCl+0.01% Tween 20 at 50° C. in 6 cycles of 15 mixes per cycle. The arrays were then stained for 5 minutes at 35° C. with a streptavidin-phycoerythrin conjugate (molecular probes), followed by 10 washing cycles of 4 mixes per cycle with 6×SSPE-T. To increase the signals, the arrays were complementarily stained with a solution of anti-streptavidin antibodies for 5 minutes, followed by 5 minutes of staining with a streptavidin-phycoerythrin conjugate. After 15 washing cycles of 4 mixes per cycle, the arrays were scanned using GC300 laser confocal scanner (Affymetrix).

[0101] Validation of Differentially Expressed Genes in CRC

[0102] The total RNA was extracted from the tumor tissue samples with mirVanaRNA isolation kit (Ambion, Austin, Tex., USA), according to the manufacturer's instructions. The collected total RNA was determined using Nanodrop ND-100025 spectrophotometer (Nanodrop Tech, DE, USA). The customized 7900 HT Taqman® low density arrays (TLDA) with microfluidic cards having 161 individual assays were ordered from Applied Biosystems (Applied Biosystems; Carlsbad, Calif., USA).

[0103] The TLDAs were developed in a 2-step process: briefly during the first step, 800 ng (50 ng/16 μl) of the total RNA were reverse transcribed using Megaplex RT primers and TaqMan RNA reverse transcription kit in a total volume of 20 μl. The reactions were incubated in a G-Storm Thermal Cycler (Gene Technologies, Essex, UK) for 5 minutes at 25° C., 30 minutes at 42° C., and one minute at 50° C. for 40 cycles, maintained for 5 minutes at 85° C. and then at 4° C. In the second step, 450 μL of the cDNA sample and 450 mL of the Taqman Universal PCR master mix were loaded into full ports, on the TLDA microfluidic card. The card was briefly centrifuged for 1 minute at (280 grams) to distribute the samples in the multiple wells connected to the full ports and then sealed to prevent contamination between wells. The TLDA cards were handled and analyzed using the ABI PRISM® 7900HT sequence detection protocol (Applied Biosystems). The reactions were incubated at 95° C. for 10 minutes, followed by 40 cycles of 15 seconds at 95° C. and one minute at 60° C.

[0104] Statistical Analysis

[0105] Clinical result variables. Statistics were used to characterize the most relevant clinical parameters. The association of categorical variables was examined using the chi-square test or Fisher's exact test. To evaluate the distribution of the continuous variables between the study groups, the parametric test (t-test) and non-parametric test (Kruskal-Wallis test) were used when suitable.

[0106] The tumor response was evaluated using conventional methods according to the RECIST 1.0 standard criteria: A complete response (CR) was defined as the disappearance of all measureable and evaluable evidence of the disease; a partial response (PR) was defined as a decrease equal to or greater than 30% in the sum of the longest diameters of target lesions; stable disease (SD) was considered when the tumor load decreased less than 30% or increased less than 20%; and progressive disease (PD) was indicated by an increase greater than 20% in the sum of the longest diameters of target lesions or the appearance of a new lesion. The patients were classified in 2 groups according to the best response to chemotherapy: those who achieved an objective response (responsive patients [R]: CR+PR) and those that did not (non-responsive patients [NR]: SD+PD). The progression-free survival (PFS) was defined as the time elapsed since the start of first-line chemotherapy until the first evidence of disease progression. The overall survival (OS) was calculated from the start of the therapy for advanced disease until the date of death from any cause. The Kaplan-Meier product-limit method was used to estimate the dependent time variables (PFS and OS), and the differences observed between the subgroups of patients were evaluated using the log-rank test. P<0.05 was considered significant. All the analyses were developed using the statistical package for social sciences software (SPSS 15.0 for Windows, SPSS Inc, Chicago, Ill.).

[0107] Microarrays

[0108] The microarray image data was analyzed using the GeneChip Operating Software (GCOS 1.4 Affymetrix). Partek Genomics Suite v7.3.1 (Partek Inc.; St. Louis, Mo., USA) was used for statistical analysis. The quality of the arrays was evaluated using parameters P called %, outlier array and non-scale normalized standard error. The data was then processed through the RMA (robust multichip average), method for obtaining individual intensity values in each array, then normalized and filtered to eliminate non-informative sequences (including control sequences, those having a hybridization signal close to background and those without changes in expression in all the samples). Finally, 9619 sequences were selected for generating the worklist. A linear regression model using the false discovery rate (abbreviated as FDR), main component analysis (MCA) and grouping techniques were used for comparing the gene expression profile between R and NR patients after first-line metastatic chemotherapy, and considering the PFS later.

[0109] Real Time Quantitative Polymerase Chain Reaction (RT-qPCR) Analysis

[0110] The target gene expression was normalized in relation to the GAPDH expression. The threshold cycle (abbreviated as Ct) values were calculated using SDS software v.2.3 (Applied Biosystems) using automatic baseline conditions and a threshold of 0.2. The expression of each target gene was calculated in relation to an endogenous GAPDH control. The data is presented as gene expression target=2ΔCt, with ΔCt=(Ct Ct-GAPDH target gene). This method is a suitable way for analyzing relative changes in gene expression of real time quantitative PCR experiments (Applied Biosystems user Bulletin no. 2 (P/N 4303859)). The gene expression was calculated using the Real-Time Statminer® software v.4.2 (Integromics, Inc). This software performs a moderated t-test between the groups (R and NR) and corrects same using the Benjamini-Hochberg algorithm (Benjamini Y, et al., 1995) with FDR established in the value of 5%. For the purpose of this study, significant gene expression was considered when the gene had been detected at least in 50% of the patients in each compared group. Furthermore, in situations in which the gene is not detectable and the Ct values are beyond the maximum Ct32, the Statminer® software establishes a value equal to the maximum.

[0111] Results

[0112] The comparison of the relative gene expression levels between patients responsive (23 patients; 62%) and patients non-responsive (14 patients; 38%) to chemotherapy are depicted in FIG. 1.

[0113] Expression differences (p<0.05) were seen in 595 genes (6.2%) from the 9619 final sequences selected after the analysis. By using the FDR test, 5% of said genes (480 genes) are considered as false positive findings. In a supervised cluster, deregulated gene expression and

[0114] PFS as a response marker were detected by detecting differential associated expression profiles (FIG. 2).

[0115] Based on both analyses, selecting those genes (n=161) with the most significant p-values and the deregulation thereof was consistent in the response to chemotherapy and in the survival analysis to be validated using qRT-PCR in an independent cohort of CRC patients and non-tumor control samples.

[0116] Identification of the Gene Expression Pattern in CRC Patients According to the Response to Chemotherapy

[0117] Twenty-four of the 161 genes were confirmed as differentially expressed genes between patients who achieved an objective response to chemotherapy (R: CR+PR) with respect to those who did not (NR: SD+PD) (p<0.05) after qRT-PCR using the Statminer® software: AQP1, CLEC3B, DCK, DEFA5, DNAJC3, FBLIM1, GAS7, IGFBP4, KSR1, LONP1, MTHFD1L, NAV1, NIPBL, PALM2, PCDHGC3, PROS1, RARA, RSF1, TENC1, TGFBR3, TRAK2, VSNL1, WHSC1L1 and WWC2.

TABLE 4
Genes differentially expressed in response to
chemotherapy in metastatic colorectal carcinoma
patients according to real time PCR analysis

| | | R vs. NR | Adjusted |
|---|---|---|---|
| Gene | Gene ID | (−ΔΔCt) | p-values* |
| AQP1 | 358 | 1.200 | 0.025 |
| CLEC3B | 7123 | 1.614 | 0.006 |
| DCK | 1633 | 0.888 | 0.044 |
| DEFA5 | 1670 | 1.599 | 0.017 |
| DNAJC3 | 5611 | 1.421 | 0.006 |
| FBLIM1 | 54751 | 0.947 | 0.038 |
| GAS7 | 8522 | 1.000 | 0.034 |
| IGFBP4 | 3487 | 0.803 | 0.025 |
| KSR1 | 8844 | 0.997 | 0.034 |
| LONP1 | 9361 | 0.800 | 0.034 |
| MTHFD1L | 25902 | 0.915 | 0.044 |
| NAV1 | 89796 | 0.881 | 0.038 |
| NIPBL | 25836 | 1.049 | 0.026 |
| PALM2 | 445815 | 1.203 | 0.024 |
| PCDHGC3 | 5098 | 0.991 | 0.038 |
| PROS1 | 5627 | 1.064 | 0.026 |
| RARA | 5914 | 0.960 | 0.034 |
| RSF1 | 51773 | 0.796 | 0.044 |
| TENC1 | 23371 | 0.942 | 0.038 |
| TGFBR3 | 7049 | 1.150 | 0.023 |
| TRAK2 | 66008 | 1.220 | 0.017 |
| VSNL1 | 7447 | 0.966 | 0.034 |
| WHSC1L1 | 54904 | 1.116 | 0.026 |
| WWC2 | 80014 | 0.932 | 0.044 |

[0118] The patients were classified into two groups. i.e., patients responsive to chemotherapy (R), including patients with complete response or partial response, and non-responsive patients (NR), including patients with stable disease or progressive disease based on the change in lesion size.

[0119] Gene ID: GenBank accession number

[0120] *The p-values obtained were adjusted for multiple tests using the Benjamini-Hochberg adjustment.

[0121] To further evaluate the differences in potentially predictive gene expression of the response to chemotherapy, the gene expression levels of samples from R patients, NR patients and non-tumor controls were compared. The results are depicted in FIG. 3. Significant differences (p<0.05) were found in 15/24 genes: AQP, CLEC3B, DCK, PROS1, WHSC1L1, TGFBR3, FBLIM1, GAS7, IGFBP4, NAV1, PCDHGC3, RARA, RSF1, TENC1 and TRAK2. Additionally, the DNAJC3 gene showed a significance limit (p=0.076).

[0122] Identification of Gene Expression Patterns in Colon Cancer Patients According to Progression-Free Survival (PFS)

[0123] The Kaplan-Meier estimator estimates the PFS according to the gene expression levels in patients grouped as above or below the mean time (11.53 months) and showed 4 genes with differential expression profile (p<0.05); FAF1, KIAA1033, N4BP2L1 and SLC12A2. Another 4 genes showed significance limit and were also considered using more analyses: DIDO1 (p=0.076), FBXO9 (p=0.054), RB1CC1 (p=0.065) and STARD13 (p=0.051).

TABLE 5
Genes differentially expressed by progression-
free survival in metastatic colorectal carcinoma
patients according to real time PCR analysis

| | | PFS_LM vs. | |
|---|---|---|---|
| | | PFS_HM | p-values* |
| Gene | Gene ID | (−ΔΔCt) | (95% CI) |
| DIDO1 | 11083 | −0.020 | 0.076 |
| FAF1 | 11124 | −0.021 | 0.022 |
| FBXO9 | 26268 | −0.116 | 0.054 |
| KIAA1033 | 23325 | −0.148 | 0.026 |
| N4BP2L1 | 90634 | −0.025 | 0.001 |
| SLC12A2 | 6558 | −0.047 | 0.033 |
| STARD13 | 90627 | −0.784 | 0.051 |
| RB1CC1 | 9821 | −0.052 | 0.065 |

[0124] The patients were classified into two groups. In patients with survival time less than the progression of the median (PFS_LM) or greater than the median (PFS_HM)

[0125] *PFS was estimated by means of the Kaplan-Meier method and the p-values were evaluated by means of the log-rank test.

[0126] Gene ID: GenBank accession number, CI: confidence interval.

[0127] These gene expression levels between patients grouped as above or below the mean time of PFS and non-tumor control samples were then compared. Significant differences are shown in 5/8 genes: N4BP2L1, STARD13, FAF1, FBXO9 and SLC12A2. (FIG. 4)

1. Simultaneous use of AQP, CLEC3B, DCK, DEFA5, DNAJC3, FBLIM1, GAS7, IGFBP4, KSR1, LONP1, MTHFD1L, NAV1, NIPBL, PALM2, PCDHGC3, PROS1, RARA, RSF1, TENC1, TGFBR3, TRAK2, VSNL1, WHSC1L1, WWC2, FAF1, FBXO9, KIAA1033, N4BP2L1, SLC12A, STARD13 and RB1CC1 genes for predicting the response to chemotherapy treatment in an individual suspected of suffering from colorectal cancer or diagnosed with colorectal cancer.

2. A method for obtaining useful data for predicting the response to chemotherapy treatment in an individual suspected of suffering from colorectal cancer or diagnosed with colorectal cancer, which comprises:
a. obtaining an isolated biological sample comprising cells from the individual, and
b. detecting the amount of expression product of AQP, CLEC3B, DCK, DEFA5, DNAJC3, FBLIM1, GAS7, IGFBP4, KSR1, LONP1, MTHFD1L, NAV1, NIPBL, PALM2, PCDHGC3, PROS1, RARA, RSF1, TENC1, TGFBR3, TRAK2, VSNL1, WHSC1L1, WWC2, FAF1, FBXO9, KIAA1033, N4BP2L1, SLC12A, STARD13 and RB1CC1 genes in the isolated sample of (a).

3. The method according to claim 3, which further comprises:
c. comparing the expression levels of AQP, CLEC3B, DCK, DEFA5, DNAJC3, FBLIM1, GAS7, IGFBP4, KSR1, LONP1, MTHFD1L, NAV1, NIPBL, PALM2, PCDHGC3, PROS1, RARA, RSF1, TENC1, TGFBR3, TRAK2, VSNL1, WHSC1L1, WWC2, FAF1, FBXO9, KIAA1033, N4BP2L1, SLC12A, STARD13 and RB1CC1 genes in the sample obtained in (a), with the amount of expression detected for said genes in a reference population of individuals with a known pathological response.

4. A method for predicting the response to chemotherapy treatment in an individual suspected of suffering from colorectal cancer or diagnosed with colorectal cancer, which comprises steps (a)-(c) according to any of claims 2-3, and further comprises:
d. including the individual having an amount of expression of AQP, CLEC3B, DCK, DEFA5, DNAJC3, FBLIM1, GAS7, IGFBP4, KSR1, LONP1, MTHFD1L, NAV1, NIPBL, PALM2, PCDHGC3, PROS1, RARA, RSF1, TENC1, TGFBR3, TRAK2, VSNL1, WHSC1L1, WWC2, FAF1, FBXO9, KIAA1033, N4BP2L1, SLC12A, STARD13 and RB1CC1 genes significantly greater than the expression levels of the same genes in a reference population, in the group of individuals responding to the colorectal cancer chemotherapy.

5. The method according to any of claims 2-4, where the sample is obtained from a colorectal tumor.

6. The method according to any of claims 2-5, wherein the amount of expression product of AQP, CLEC3B, DCK, DEFA5, DNAJC3, FBLIM1, GAS7, IGFBP4, KSR1, LONP1, MTHFD1L, NAV1, NIPBL, PALM2, PCDHGC3, PROS1, RARA, RSF1, TENC1, TGFBR3, TRAK2, VSNL1, WHSC1L1, WWC2, FAF1, FBXO9, KIAA1033, N4BP2L1, SLC12A, STARD13 and RB1CC1 genes is obtained by means of:
a. a genetic profiling method, such as a microarray, and/or
b. a method comprising PCR, such as real time PCR; and/or
c. Northern blot

7. The method according to the preceding claim, where the amount of expression product of AQP, CLEC3B, DCK, DEFA5, DNAJC3, FBLIM1, GAS7, IGFBP4, KSR1, LONP1, MTHFD1L, NAV1, NIPBL, PALM2, PCDHGC3, PROS1, RARA, RSF1, TENC1, TGFBR3, TRAK2, VSNL1, WHSC1L1, WWC2, FAF1, FBXO9, KIAA1033, N4BP2L1, SLC12A, STARD13 and RB1CC1 genes is obtained by means of real time quantitative PCR.

8. The method according to claim 7, where the expression product is detected by means of microarrays.

9. The method for predicting the response to chemotherapy treatment in an individual suspected of suffering from colorectal cancer or diagnosed with colorectal cancer according to any of claims 2-9, where the chemotherapy treatment comprises the use of platinum-based compounds, topoisomerase I-inhibiting compounds, pyrimidine analog compounds, or any of the combinations thereof.

10. The method for predicting the response to chemotherapy treatment in an individual suspected of suffering from colorectal cancer or diagnosed with colorectal cancer according to the preceding claim, where the platinum-based compound is oxaliplatin, the topoisomerase I inhibitor is irinotecan, and the pyrimidine analog is 5-fluorouracil.

11. A method for tracking the progression of colorectal cancer which comprises performing at least twice the sequence of steps (a) and (c) according to any of claims 3-10, on biological samples from one and the same individual isolated at different times.

12. A kit or device according to the preceding claim, comprising the primers and probes designed based on the nucleotide sequences of Table 1.

13. A microarray comprising oligonucleotides or single-channel microarrays designed based on a known sequence or an mRNA of AQP, CLEC3B, DCK, DEFA5, DNAJC3, FBLIM1, GAS7, IGFBP4, KSR1, LONP1, MTHFD1L, NAV1, NIPBL, PALM2, PCDHGC3, PROS1, RARA, RSF1, TENC1, TGFBR3, TRAK2, VSNL1, WHSC1L1, WWC2, FAF1, FBXO9, KIAA1033, N4BP2L1, SLC12A, STARD13 and RB1CC1 genes.

14. The microarray according to the preceding claim, where the sequence of AQP, CLEC3B, DCK, DEFA5, DNAJC3, FBLIM1, GAS7, IGFBP4, KSR1, LONP1, MTHFD1L, NAV1, NIPBL, PALM2, PCDHGC3, PROS1, RARA, RSF1, TENC1, TGFBR3, TRAK2, VSNL1, WHSC1L1, WWC2, FAF1, FBXO9, KIAA1033, N4BP2L1, SLC12A, STARD13 and RB1CC1 genes is the nucleotide sequence SEQ ID listed in Table 1, respectively.

15. Use of the kit or device according to any of claims 12-13, or of the microarray according to any of claims 14-15, for obtaining useful data for predicting the response to treatment in colorectal cancer patients.

The application's sequence listing, which the Patent Office published only in electronic form, follows.

SEQUENCE LISTING (164 sequences)

SEQ ID NO: 1 - DNA, 2807 bp, Homo sapiens
gtgctccccccgccccccggccctataaataggcccagcccaggctgtggctcagctctcagagggaattgagcacccggcagcggtctcaggccaagccccctgccagcatggccagcgagttcaagaagaagctcttctggagggcagtggtggccgagttcctggccacgaccctctttgtcttcatcagcatcggttctgccctgggcttcaaatacccggtggggaacaaccagacggcggtccaggacaacgtgaaggtgtcgctggccttcgggctgagcatcgccacgctggcgcagagtgtgggccacatcagcggcgcccacctcaacccggctgtcacactggggctgctgctcagctgccagatcagcatcttccgtgccctcatgtacatcatcgcccagtgcgtgggggccatcgtcgccaccgccatcctctcaggcatcacctcctccctgactgggaactcgcttggccgcaatgacctggctgatggtgtgaactcgggccagggcctgggcatcgagatcatcgggaccctccagctggtgctatgcgtgctggctactaccgaccggaggcgccgtgaccttggtggctcagccccccttgccatcggcctctctgtagcccttggacacctcctggctattgactacactggctgtgggattaaccctgctcggtcctttggctccgcggtgatcacacacaacttcagcaaccactggattttctgggtggggccattcatcgggggagccctggctgtactcatctacgacttcatcctggccccacgcagcagtgacctcacagaccgcgtgaaggtgtggaccagcggccaggtggaggagtatgacctggatgccgacgacatcaactccagggtggagatgaagcccaaatagaaggggtctggcccgggcatccacgtagggggcaggggcaggggcgggcggagggaggggaggggtgaaatccatactgtagacactctgacaagctggccaaagtcacttccccaagatctgccagacctgcatggtcaagcctcttatgggggtgtttctatctctttctttctctttctgtttcctggcctcagagcttcctggggaccaagatttaccaattcacccactcccttgaagttgtggaggaggtgaaagaaagggacccacctgctagtcgcccctcagagcatgatgggaggtgtgccagaaagtcccccctcgccccaaagttgctcaccgactcacctgcgcaagtgcctgggattctaccgtaattgctttgtgcctttgggcacggccctccttcttttcctaacatgcaccttgctcccaatggtgcttggagggggaagagatcccaggaggtgcagtggagggggcaagctttgctccttcagttctgcttgctcccaagcccctgacccgctcggacttactgcctgaccttggaatcgtccctatatcagggcctgagtgacctccttctgcaaagtggcagggaccggcagagctctacaggcctgcagcccctaagtgcaaacacagcatgggtccagaagacgtggtctagaccagggctgctctttccacttgccctgtgttctttccccaggggcatgactgtcgccacacgcctctgtgtacatgtgtgcagagcagacaggctacaaagcagagatcgacagacagccaggtagttggaactttctgttccctatggagaggcttccctacacagggcctgctattgcagaatgaagccatttagagggtgaaggagaaatacccatgttacttctctgagttttagttggtctttccatctatcactgcattatcttgctcattcttcagttctctactccctcttgtcagtgtagacacaggtcaccattatgctggtgtatgtttatcaaagagcacttgagctgtctgaagcccaaagcctgaggacagaaagaccctgatgcaggtcagcccatggaggcagatgcccttgctgggcctgggggttttccaagccctcagctggtcctgaccaggatggagcaagctcttcccttgctcatgagctcctgatcagaggcatttgagcagctgaataacctgcacaggcttgctgtatgacccctggccacagccttccctctgcattgacctggaggggagaggtcagccttgacctaatgaggtagctatagttgcagcccaaggacagttcagagatcaggatcagctttgaaggctggattctatctacataagtcctttcaattccaccagggccagagcagctccaccactgtgcacttagccatgatggcaacagaaaccaagagacacaattacgcaggtatttagaagcagagggacaaccagaaggcccttaactatcaccagtgcatcacatctgcacactctcttctccattccctagcaggaacttctagctcatttaacagataaagaaactgaggcccacggtttcagctagacaatgatttggccaggcctagtaaccaaggccctgtctctggctactccctggaccacgaggctgattcctctcatttccagcttctcagtttctgcctgggcaatggccaggggccaggagtggggagagttgtgatggaggggagaggggtcacacccaccccctgcctggttctaggctgctgcacaccaaggccctgcatctgtctgctctgcatatatgtctctttggagttggaatttcattatatgttaagaaaataaaggaaaatgacttgtaaggtc

SEQ ID NO: 2 - DNA, 2487 bp, Homo sapiens
taaaagtggcccaggagagtgctcctgaccatcaccttcatgcctggggctcgccccttgcctctggtcttggtaccccagaataccctggcctggatgcagctggatgcaaaggccccagctcaccccaggcctctccagcttctaggcagagtggggcctgggtctaggcagctggctgatggtgtgaactcgggccagggcctgggcatcgagatcatcgggaccctccagctggtgctatgcgtgctggctactaccgaccggaggcgccgtgaccttggtggctcagccccccttgccatcggcctctctgtagcccttggacacctcctggctattgactacactggctgtgggattaaccctgctcggtcctttggctccgcggtgatcacacacaacttcagcaaccactggattttctgggtggggccattcatcgggggagccctggctgtactcatctacgacttcatcctggccccacgcagcagtgacctcacagaccgcgtgaaggtgtggaccagcggccaggtggaggagtatgacctggatgccgacgacatcaactccagggtggagatgaagcccaaatagaaggggtctggcccgggcatccacgtagggggcaggggcaggggcgggcggagggaggggaggggtgaaatccatactgtagacactctgacaagctggccaaagtcacttccccaagatctgccagacctgcatggtcaagcctcttatgggggtgtttctatctctttctttctctttctgtttcctggcctcagagcttcctggggaccaagatttaccaattcacccactcccttgaagttgtggaggaggtgaaagaaagggacccacctgctagtcgcccctcagagcatgatgggaggtgtgccagaaagtcccccctcgccccaaagttgctcaccgactcacctgcgcaagtgcctgggattctaccgtaattgctttgtgcctttgggcacggccctccttcttttcctaacatgcaccttgctcccaatggtgcttggagggggaagagatcccaggaggtgcagtggagggggcaagctttgctccttcagttctgcttgctcccaagcccctgacccgctcggacttactgcctgaccttggaatcgtccctatatcagggcctgagtgacctccttctgcaaagtggcagggaccggcagagctctacaggcctgcagcccctaagtgcaaacacagcatgggtccagaagacgtggtctagaccagggctgctctttccacttgccctgtgttctttccccaggggcatgactgtcgccacacgcctctgtgtacatgtgtgcagagcagacaggctacaaagcagagatcgacagacagccaggtagttggaactttctgttccctatggagaggcttccctacacagggcctgctattgcagaatgaagccatttagagggtgaaggagaaatacccatgttacttctctgagttttagttggtctttccatctatcactgcattatcttgctcattcttcagttctctactccctcttgtcagtgtagacacaggtcaccattatgctggtgtatgtttatcaaagagcacttgagctgtctgaagcccaaagcctgaggacagaaagaccctgatgcaggtcagcccatggaggcagatgcccttgctgggcctgggggttttccaagccctcagctggtcctgaccaggatggagcaagctcttcccttgctcatgagctcctgatcagaggcatttgagcagctgaataacctgcacaggcttgctgtatgacccctggccacagccttccctctgcattgacctggaggggagaggtcagccttgacctaatgaggtagctatagttgcagcccaaggacagttcagagatcaggatcagctttgaaggctggattctatctacataagtcctttcaattccaccagggccagagcagctccaccactgtgcacttagccatgatggcaacagaaaccaagagacacaattacgcaggtatttagaagcagagggacaaccagaaggcccttaactatcaccagtgcatcacatctgcacactctcttctccattccctagcaggaacttctagctcatttaacagataaagaaactgaggcccacggtttcagctagacaatgatttggccaggcctagtaaccaaggccctgtctctggctactccctggaccacgaggctgattcctctcatttccagcttctcagtttctgcctgggcaatggccaggggccaggagtggggagagttgtgatggaggggagaggggtcacacccaccccctgcctggttctaggctgctgcacaccaaggccctgcatctgtctgctctgcatatatgtctctttggagttggaatttcattatatgttaagaaaataaaggaaaatgacttgtaaggtc

SEQ ID NO: 3 - DNA, 2662 bp, Homo sapiens
gagagggtggagacaatagggaggcaggcacagaggagaaagaggggtggagggagccaggacctcaccgaaggcctcctcagccctggaatttagatgcagtcgggcatggggtggaatgttctggacttttgggtatgaagccgtgtcccctgctgggccttcccacctttttgcatctcttctcctaggagtgctcctgaccatcaccttcatgcctggggctcgccccttgcctctggtcttggtaccccagaataccctggcctggatgcagctggatgcaaaggccccagctcaccccaggcctctccagcttctaggcagagtggggcctgggtctaggcagctggctgatggtgtgaactcgggccagggcctgggcatcgagatcatcgggaccctccagctggtgctatgcgtgctggctactaccgaccggaggcgccgtgaccttggtggctcagccccccttgccatcggcctctctgtagcccttggacacctcctggctattgactacactggctgtgggattaaccctgctcggtcctttggctccgcggtgatcacacacaacttcagcaaccactggattttctgggtggggccattcatcgggggagccctggctgtactcatctacgacttcatcctggccccacgcagcagtgacctcacagaccgcgtgaaggtgtggaccagcggccaggtggaggagtatgacctggatgccgacgacatcaactccagggtggagatgaagcccaaatagaaggggtctggcccgggcatccacgtagggggcaggggcaggggcgggcggagggaggggaggggtgaaatccatactgtagacactctgacaagctggccaaagtcacttccccaagatctgccagacctgcatggtcaagcctcttatgggggtgtttctatctctttctttctctttctgtttcctggcctcagagcttcctggggaccaagatttaccaattcacccactcccttgaagttgtggaggaggtgaaagaaagggacccacctgctagtcgcccctcagagcatgatgggaggtgtgccagaaagtcccccctcgccccaaagttgctcaccgactcacctgcgcaagtgcctgggattctaccgtaattgctttgtgcctttgggcacggccctccttcttttcctaacatgcaccttgctcccaatggtgcttggagggggaagagatcccaggaggtgcagtggagggggcaagctttgctccttcagttctgcttgctcccaagcccctgacccgctcggacttactgcctgaccttggaatcgtccctatatcagggcctgagtgacctccttctgcaaagtggcagggaccggcagagctctacaggcctgcagcccctaagtgcaaacacagcatgggtccagaagacgtggtctagaccagggctgctctttccacttgccctgtgttctttccccaggggcatgactgtcgccacacgcctctgtgtacatgtgtgcagagcagacaggctacaaagcagagatcgacagacagccaggtagttggaactttctgttccctatggagaggcttccctacacagggcctgctattgcagaatgaagccatttagagggtgaaggagaaatacccatgttacttctctgagttttagttggtctttccatctatcactgcattatcttgctcattcttcagttctctactccctcttgtcagtgtagacacaggtcaccattatgctggtgtatgtttatcaaagagcacttgagctgtctgaagcccaaagcctgaggacagaaagaccctgatgcaggtcagcccatggaggcagatgcccttgctgggcctgggggttttccaagccctcagctggtcctgaccaggatggagcaagctcttcccttgctcatgagctcctgatcagaggcatttgagcagctgaataacctgcacaggcttgctgtatgacccctggccacagccttccctctgcattgacctggaggggagaggtcagccttgacctaatgaggtagctatagttgcagcccaaggacagttcagagatcaggatcagctttgaaggctggattctatctacataagtcctttcaattccaccagggccagagcagctccaccactgtgcacttagccatgatggcaacagaaaccaagagacacaattacgcaggtatttagaagcagagggacaaccagaaggcccttaactatcaccagtgcatcacatctgcacactctcttctccattccctagcaggaacttctagctcatttaacagataaagaaactgaggcccacggtttcagctagacaatgatttggccaggcctagtaaccaaggccctgtctctggctactccctggaccacgaggctgattcctctcatttccagcttctcagtttctgcctgggcaatggccaggggccaggagtggggagagttgtgatggaggggagaggggtcacacccaccccctgcctggttctaggctgctgcacaccaaggccctgcatctgtctgctctgcatatatgtctctttggagttggaatttcattatatgttaagaaaataaaggaaaatgacttgtaaggtc

SEQ ID NO: 4 - DNA, 2434 bp, Homo sapiens
aatagggaggcaggcacagaggagaaagaggggtggagggagccaggacctcaccgaaggcctcctcagccctggaatttagatgcagtcgggcatggggtggaatgttctggacttttggctggctgatggtgtgaactcgggccagggcctgggcatcgagatcatcgggaccctccagctggtgctatgcgtgctggctactaccgaccggaggcgccgtgaccttggtggctcagccccccttgccatcggcctctctgtagcccttggacacctcctggctattgactacactggctgtgggattaaccctgctcggtcctttggctccgcggtgatcacacacaacttcagcaaccactggattttctgggtggggccattcatcgggggagccctggctgtactcatctacgacttcatcctggccccacgcagcagtgacctcacagaccgcgtgaaggtgtggaccagcggccaggtggaggagtatgacctggatgccgacgacatcaactccagggtggagatgaagcccaaatagaaggggtctggcccgggcatccacgtagggggcaggggcaggggcgggcggagggaggggaggggtgaaatccatactgtagacactctgacaagctggccaaagtcacttccccaagatctgccagacctgcatggtcaagcctcttatgggggtgtttctatctctttctttctctttctgtttcctggcctcagagcttcctggggaccaagatttaccaattcacccactcccttgaagttgtggaggaggtgaaagaaagggacccacctgctagtcgcccctcagagcatgatgggaggtgtgccagaaagtcccccctcgccccaaagttgctcaccgactcacctgcgcaagtgcctgggattctaccgtaattgctttgtgcctttgggcacggccctccttcttttcctaacatgcaccttgctcccaatggtgcttggagggggaagagatcccaggaggtgcagtggagggggcaagctttgctccttcagttctgcttgctcccaagcccctgacccgctcggacttactgcctgaccttggaatcgtccctatatcagggcctgagtgacctccttctgcaaagtggcagggaccggcagagctctacaggcctgcagcccctaagtgcaaacacagcatgggtccagaagacgtggtctagaccagggctgctctttccacttgccctgtgttctttccccaggggcatgactgtcgccacacgcctctgtgtacatgtgtgcagagcagacaggctacaaagcagagatcgacagacagccaggtagttggaactttctgttccctatggagaggcttccctacacagggcctgctattgcagaatgaagccatttagagggtgaaggagaaatacccatgttacttctctgagttttagttggtctttccatctatcactgcattatcttgctcattcttcagttctctactccctcttgtcagtgtagacacaggtcaccattatgctggtgtatgtttatcaaagagcacttgagctgtctgaagcccaaagcctgaggacagaaagaccctgatgcaggtcagcccatggaggcagatgcccttgctgggcctgggggttttccaagccctcagctggtcctgaccaggatggagcaagctcttcccttgctcatgagctcctgatcagaggcatttgagcagctgaataacctgcacaggcttgctgtatgacccctggccacagccttccctctgcattgacctggaggggagaggtcagccttgacctaatgaggtagctatagttgcagcccaaggacagttcagagatcaggatcagctttgaaggctggattctatctacataagtcctttcaattccaccagggccagagcagctccaccactgtgcacttagccatgatggcaacagaaaccaagagacacaattacgcaggtatttagaagcagagggacaaccagaaggcccttaactatcaccagtgcatcacatctgcacactctcttctccattccctagcaggaacttctagctcatttaacagataaagaaactgaggcccacggtttcagctagacaatgatttggccaggcctagtaaccaaggccctgtctctggctactccctggaccacgaggctgattcctctcatttccagcttctcagtttctgcctgggcaatggccaggggccaggagtggggagagttgtgatggaggggagaggggtcacacccaccccctgcctggttctaggctgctgcacaccaaggccctgcatctgtctgctctgcatatatgtctctttggagttggaatttcattatatgttaagaaaataaaggaaaatgacttgtaaggtc

SEQ ID NO: 5 - DNA, 886 bp, Homo sapiens
gctgctgccttaagacgtgcagcctgggccgtggctgtcactgcgttcggacccagacccgctgcaggcagcagcagcccccgcccgcgcagcagcatggagctctggggggcctacctcctcctctgcctcttctccctcctgacccaggtcaccaccgagccaccaacccagaagcccaagaagattgtaaatgccaagaaagatgttgtgaacacaaagatgtttgaggagctcaagagccgtctggacaccctggcccaggaggtggccctgctgaaggagcagcaggccctgcagacggtctgcctgaaggggaccaaggtgcacatgaaatgctttctggccttcacccagacgaagaccttccacgaggccagcgaggactgcatctcgcgcgggggcaccctgggcacccctcagactggctcggagaacgacgccctgtatgagtacctgcgccagagcgtgggcaacgaggccgagatctggctgggcctcaacgacatggcggccgagggcacctgggtggacatgaccggcgcccgcatcgcctacaagaactgggagactgagatcaccgcgcaacccgatggcggcaagaccgagaactgcgcggtcctgtcaggcgcggccaacggcaagtggttcgacaagcgctgccgcgatcagctgccctacatctgccagttcgggatcgtgtagccggcggggcgggggccgtggggggcctggaggagggcaggggccgcgggaggccgggaggagggtggggaccttgcagcccccatcctctccgtgcgcttggagcctctttttgcaaataaagttggtgcagcttcgcggagaggaaaaaaaaaaaaaaaaaaaaaaaaaaaaaaaaaaa

SEQ ID NO: 6 - DNA, 2594 bp, Homo sapiens
agcaaatcgcattgcgcagacgaccagcgggcgcctcggattccgcccccgggatggccccgcctcctcccgccccgcggcaaggcacgcacagggcagtgcgcgggtgggtgggtcctagcagcgcggcctgacgggaccaaggcggcgggagtctgcggtcgttccctcggctgtggaccgggcggcacgcacgcggtgcagggtaacatggcggatgcggaagtaattattttgccaaagaaacataagaagaaaaaggagcggaagtcattgccagaagaagatgtagccgaaatacaacacgctgaagaatttcttatcaaacctgaatccaaagttgctaagttggacacgtctcagtggccccttttgctaaagaattttgataagctgaatgtaaggacaacacactatacacctcttgcatgtggttcaaatcctctgaagagagagattggggactatatcaggacaggtttcattaatcttgacaagccctctaacccctcttcccatgaggtggtagcctggattcgacggatacttcgggtggagaagacagggcacagtggtactctggatcccaaggtgactggttgtttaatcgtgtgcatagaacgagccactcgcttggtgaagtcacaacagagtgcaggcaaagagtatgtggggattgtccggctgcacaatgctattgaaggggggacccagctttctagggccctagaaactctgacaggtgccttattccagcgacccccacttattgctgcagtaaagaggcagctccgagtgaggaccatctacgagagcaaaatgattgaatacgatcctgaaagaagattaggaatcttttgggtgagttgtgaggctggcacctacattcggacattatgtgtgcaccttggtttgttattgggagttggtggtcagatgcaggagcttcggagggttcgttctggagtcatgagtgaaaaggaccacatggtgacaatgcatgatgtgcttgatgctcagtggctgtatgataaccacaaggatgagagttacctgcggcgagttgtttaccctttggaaaagctgttgacatctcataaacggctggttatgaaagacagtgcagtaaatgccatctgctatggggccaagattatgcttccaggtgttcttcgatatgaggacggcattgaggtcaatcaggagattgtggttatcaccaccaaaggagaagcaatctgcatggctattgcattaatgaccacagcggtcatctctacctgcgaccatggtatagtagccaagatcaagagagtgatcatggagagagacacttaccctcggaagtggggtttaggtccaaaggcaagtcagaagaagctgatgatcaagcagggccttctggacaagcatgggaagcccacagacagcacacctgccacctggaagcaggagtatgttgactacagtgagtctgccaaaaaagaggtggttgctgaagtggtaaaagccccgcaggtagttgccgaagcagcaaaaactgcgaagcggaagcgagagagtgagagtgaaagtgacgagactcctccagcagctcctcagttgatcaagaaggaaaagaagaagagtaagaaggacaagaaggccaaagctggtctggagagcggggccgagcctggagatggggacagtgataccaccaagaagaagaagaagaagaagaaagcaaaagaggtagaattggtttctgagtagtgaaggccacttgaagctggaggagaaactaaagccttattgagaaaacatgttatagatccttttgttgctgagagagtggaacataggtcctagacagggtgaagagttctggcacattttagctgctactttgagacctcggtgatgttacctggtgtggtcatcccatcttgtcctgttttaaggatatgggtggtgaaagatgaaagaggcagagtttatcccaatgacttctctgtttgagttgggaagcctcaccttcagacccagtaactgtccgcagctgtctgctagtggttgtcttaacatcgtagtcctagtttgcattttttaaatcccctctgtttaaaaggtttgtaaaacaaaaacaaaaaactaagtctgctcagtgaaatgctgtagaaccctaaataagtggtagaagagtgtcactgaattttgtctctgaattcagtataactgagttttgtccatgctggtgtctgggttataggcctgatgggcctggtagttttccatcttgttctggcctagaggtcagtcctttgcacttcctcaaagcttgtgtacagtgctcacctaaatccatctgactacttgttcctgtgccctcttgttttaggcctcgtttacttttaaaaaatgaaattgttcattgctgggagaagaatgttgtaatttttacttattaaagtcaacttgttaagttttttatgtattcctgttgggttttcttgttgatctcatgctagcagagcaaaaattgtaaaatattttgattaaaaatctagggacctttatgtcctatttgaaatgtgaaaaaaaaaaaaaaaaaa

SEQ ID NO: 7 - DNA, 2579 bp, Homo sapiens
agcaaatcgcattgcgcagacgaccagcgggcgcctcggattccgcccccgggatggccccgcctcctcccgccccgcggcaaggcacgcacagggcagtgcgcgggtgggtgggtcctagcagcgcggcctgacgggaccaaggcggcgggagtctgcggtcgttccctcggctgtggaccgggcggcacgcacgcggtgcagggtaacatggcggatgcggaagtaattattttgccaaagaaacataagaagaaaaaggagcggaagtcattgccagaagaagatgtagccgaaatacaacacgctgaagaatttcttatcaaacctgaatccaaagttgctaagttggacacgtctcagtggccccttttgctaaagaattttgataagctgaatgtaaggacaacacactatacacctcttgcatgtggttcaaatcctctgaagagagagattggggactatatcaggacaggtttcattaatcttgacaagccctctaacccctcttcccatgaggtggtagcctggattcgacggatacttcgggtggagaagacagggcacagtggtactctggatcccaaggtgactggttgtttaatcgtgtgcatagaacgagccactcgcttggtgaagtcacaacagagtgcaggcaaagagtatgtggggattgtccggctgcacaatgctattgaaggggggacccagctttctagggccctagaaactctgacaggtgccttattccagcgacccccacttattgctgcagtaaagaggcagctccgagtgaggaccatctacgagagcaaaatgattgaatacgatcctgaaagaagattaggaatcttttgggtgagttgtgaggctggcacctacattcggacattatgtgtgcaccttggtttgttattgggagttggtggtcagatgcaggagcttcggagggttcgttctggagtcatgagtgaaaaggaccacatggtgacaatgcatgatgtgcttgatgctcagtggctgtatgataaccacaaggatgagagttacctgcggcgagttgtttaccctttggaaaagctgttgacatctcataaacggctggttatgaaagacagtgcagtaaatgccatctgctatggggccaagattatgcttccaggtgttcttcgatatgaggacggcattgaggtcaatcaggagattgtggttatcaccaccaaaggagaagcaatctgcatggctattgcattaatgaccacagcggtcatctctacctgcgaccatggtatagtagccaagatcaagagagtgatcatggagagagacacttaccctcggaagtggggtttaggtccaaaggcaagtcagaagaagctgatgatcaagcagggccttctggacaagcatgggaagcccacagacagcacacctgccacctggaagcaggatgagtctgccaaaaaagaggtggttgctgaagtggtaaaagccccgcaggtagttgccgaagcagcaaaaactgcgaagcggaagcgagagagtgagagtgaaagtgacgagactcctccagcagctcctcagttgatcaagaaggaaaagaagaagagtaagaaggacaagaaggccaaagctggtctggagagcggggccgagcctggagatggggacagtgataccaccaagaagaagaagaagaagaagaaagcaaaagaggtagaattggtttctgagtagtgaaggccacttgaagctggaggagaaactaaagccttattgagaaaacatgttatagatccttttgttgctgagagagtggaacataggtcctagacagggtgaagagttctggcacattttagctgctactttgagacctcggtgatgttacctggtgtggtcatcccatcttgtcctgttttaaggatatgggtggtgaaagatgaaagaggcagagtttatcccaatgacttctctgtttgagttgggaagcctcaccttcagacccagtaactgtccgcagctgtctgctagtggttgtcttaacatcgtagtcctagtttgcattttttaaatcccctctgtttaaaaggtttgtaaaacaaaaacaaaaaactaagtctgctcagtgaaatgctgtagaaccctaaataagtggtagaagagtgtcactgaattttgtctctgaattcagtataactgagttttgtccatgctggtgtctgggttataggcctgatgggcctggtagttttccatcttgttctggcctagaggtcagtcctttgcacttcctcaaagcttgtgtacagtgctcacctaaatccatctgactacttgttcctgtgccctcttgttttaggcctcgtttacttttaaaaaatgaaattgttcattgctgggagaagaatgttgtaatttttacttattaaagtcaacttgttaagttttttatgtattcctgttgggttttcttgttgatctcatgctagcagagcaaaaattgtaaaatattttgattaaaaatctagggacctttatgtcctatttgaaatgtgaaaaaaaaaaaaaaaaaa

SEQ ID NO: 8 - DNA, 3595 bp, Homo sapiens
tttggaaacgtcacactgtggaggaaaagcagcaactagggagctggtgaagaaggatgtctcagcagtgtttactaggcctccaacactagagcccatcccccagctccgaaaagcttcctggaaatgtccttgttatcacttcccctctcgggctgggcgctgggagcgggcggtctcctccgcccccggctgttccgccgaggctcgctgggtcgctggcgccgccgcgcagcacggctcagaccgaggcgcacaggctcgcagctccgcggcgcctagcgctccggtccccgccgcgacgcgccaccgtccctgccggcgcctccgcgcgcttcgaaatgagggtcctgggtgggcgctgcggggcgctgctggcgtgtctcctcctagtgcttcccgtctcagaggcaaactttttgtcaaagcaacaggcttcacaagtcctggttaggaagcgtcgtgcaaattctttacttgaagaaaccaaacagggtaatcttgaaagagaatgcatcgaagaactgtgcaataaagaagaagccagggaggtctttgaaaatgacccggaaacggattatttttatccaaaatacttagtttgtcttcgctcttttcaaactgggttattcactgctgcacgtcagtcaactaatgcttatcctgacctaagaagctgtgtcaatgccattccagaccagtgtagtcctctgccatgcaatgaagatggatatatgagctgcaaagatggaaaagcttcttttacttgcacttgtaaaccaggttggcaaggagaaaagtgtgaatttgacataaatgaatgcaaagatccctcaaatataaatggaggttgcagtcaaatttgtgataatacacctggaagttaccactgttcctgtaaaaatggttttgttatgctttcaaataagaaagattgtaaagatgtggatgaatgctctttgaagccaagcatttgtggcacagctgtgtgcaagaacatcccaggagattttgaatgtgaatgccccgaaggctacagatataatctcaaatcaaagtcttgtgaagatatagatgaatgctctgagaacatgtgtgctcagctttgtgtcaattaccctggaggttacacttgctattgtgatgggaagaaaggattcaaacttgcccaagatcagaagagttgtgaggttgtttcagtgtgccttcccttgaaccttgacacaaagtatgaattactttacttggcggagcagtttgcaggggttgttttatatttaaaatttcgtttgccagaaatcagcagattttcagcagaatttgatttccggacatatgattcagaaggcgtgatactgtacgcagaatctatcgatcactcagcgtggctcctgattgcacttcgtggtggaaagattgaagttcagcttaagaatgaacatacatccaaaatcacaactggaggtgatgttattaataatggtctatggaatatggtgtctgtggaagaattagaacatagtattagcattaaaatagctaaagaagctgtgatggatataaataaacctggacccctttttaagccggaaaatggattgctggaaaccaaagtatactttgcaggattccctcggaaagtggaaagtgaactcattaaaccgattaaccctcgtctagatggatgtatacgaagctggaatttgatgaagcaaggagcttctggaataaaggaaattattcaagaaaaacaaaataagcattgcctggttactgtggagaagggctcctactatcctggttctggaattgctcaatttcacatagattataataatgtatccagtgctgagggttggcatgtaaatgtgaccttgaatattcgtccatccacgggcactggtgttatgcttgccttggtttctggtaacaacacagtgccctttgctgtgtccttggtggactccacctctgaaaaatcacaggatattctgttatctgttgaaaatactgtaatatatcggatacaggccctaagtctatgttccgatcaacaatctcatctggaatttagagtcaacagaaacaatctggagttgtcgacaccacttaaaatagaaaccatctcccatgaagaccttcaaagacaacttgccgtcttggacaaagcaatgaaagcaaaagtggccacatacctgggtggccttccagatgttccattcagtgccacaccagtgaatgccttttataatggctgcatggaagtgaatattaatggtgtacagttggatctggatgaagccatttctaaacataatgatattagagctcactcatgtccatcagtttggaaaaagacaaagaattcttaaggcatcttttctctgcttataataccttttccttgtgtgtaattatacttatgtttcaataacagctgaagggttttatttacaatgtgcagtctttgattattttgtggtcctttcctgggatttttaaaaggtcctttgtcaaggaaaaaaattctgttgtgatataaatcacagtaaagaaattcttacttctcttgctatctaagaatagtgaaaaataacaattttaaatttgaatttttttcctacaaatgacagtttcaatttttgtttgtaaaactaaattttaattttatcatcatgaactagtgtctaaatacctatgtttttttcagaaagcaaggaagtaaactcaaacaaaagtgcgtgtaattaaatactattaatcataggcagatactattttgtttatgtttttgtttttttcctgatgaaggcagaagagatggtggtctattaaatatgaattgaatggagggtcctaatgccttatttcaaaacaattcctcagggggaacagctttggcttcatctttctcttgtgtggcttcacatttaaaccagtatctttattgaattagaaaacaagtgggacatattttcctgagagcagcacaggaatcttcttcttggcagctgcagtctgtcaggatgagatatcagattaggttggataggtggggaaatctgaagtgggtacattttttaaattttgctgtgtgggtcacacaaggtctacattacaaaagacagaattcagggatggaaaggagaatgaacaaatgtgggagttcatagttttccttgaatccaacttttaattaccagagtaagttgccaaaatgtgattgttgaagtacaaaaggaactatgaaaaccagaacaaattttaacaaaaggacaaccacagagggatatagtgaatatcgtatcattgtaatcaaagaagtaaggaggtaagattgccacgtgcctgctggtactgtgatgcatttcaagtggcagttttatcacgtttgaatctaccattcatagccagatgtgtatcagatgtttcactgacagtttttaacaataaattcttttcactgtattttatatcacttataataaatcggtgtataattttaaaatgcatgtgaatatctttattatatcaactgtttgaataaaacaaaattacataatagacatttaactcttcaaaaaaaaaaaaaaaa

SEQ ID NO: 9 - DNA, 5431 bp, Homo sapiens
gggggctttgtgcgcggcggcggcgggagaggcggcggcggcggccagcacggaggcggaggccgagggggctgtgcacaggtcgccgcggagaggcgtgcgaattccgagccgagcgccgaggaccgtgctacccaggccgggctgccagccgcaggctcctctctggcagcagcggcggcgcggcgacccccgtccctcggcctccccttcccatcccacctcccgagccttcctcttcccgcagcacgcccggcccggcccggccgtggccctcctcagtgccggccgccatggcagaggcgtccggcgcggggaaaatctagcccggggatttcatgcggcctagctcggttccgcctcctcctcgcgcggccccagcggctgcccgcaccccagccccactccgggcctccgtgtctctcctgtgatcgcactgacacggccggggggttagaatggaacaaactgaaggcccgatgagagaaagggaaagttaaggatgctggagcagaacaatggatttctctttctctttcatgcaagggatcatgggaaacacaattcagcaaccacctcaactcattgactccgccaacatccgtcaggaggatgcctttgataacaacagtgacattgctgaagatggtggccagacaccatatgaagctactttgcagcaaggctttcagtacccagctacaacagaagatcttcctccactcacaaatgggtatccatcatcaatcagtgtgtatgaaactcaaaccaaataccagtcatataatcagtatcctaatgggtcagccaatggctttggtgcagttagaaactttagccccactgactattatcattcagaaattccaaacacaagaccacatgaaattctggaaaaaccttcccctccacagccaccacctcctccttcggtaccacaaactgtgattccaaagaagactggctcacctgaaattaaactaaaaataaccaaaactatccagaatggcagggaattgtttgagtcttccctttgtggagaccttttaaatgaagtacaggcaagtgagcacacgaaatcaaagcatgaaagcagaaaagaaaagaggaaaaaaagcaacaagcatgactcatcaagatctgaagagcgcaagtcacacaaaatccccaaattagaaccagaggaacaaaatagaccaaatgagagggttgacactgtatcagaaaaaccaagggaagaaccagtactaaaagaggaagccccagttcagccaatactatcttctgttccaacaacggaagtgtccactggtgttaagtttcaggttggcgatcttgtgtggtccaaggtgggaacctatccttggtggccttgtatggtttcaagtgatccccagcttgaggttcatactaaaattaacacaagaggtgcccgagaatatcatgtccagttttttagcaaccagccagagagggcgtgggttcatgaaaaacgggtacgagagtataaaggtcataaacagtatgaagaattactggctgaggcaaccaaacaagccagcaatcactctgagaaacaaaagattcggaaaccccgacctcagagagaacgtgctcagtgggatattggcattgcccatgcagagaaagcattgaaaatgactcgagaagaaagaatagaacagtatacttttatttacattgataaacagcctgaagaggctttatcccaagcaaaaaagagtgttgcctccaaaaccgaagttaaaaaaacccgacgaccaagatctgtgctgaatactcagccagaacagaccaatgcaggggaggtggcctcctcactctcaagtactgaaattcggagacatagccagaggcggcacacaagtgcggaagaggaagagccaccgcctgttaaaatagcctggaaaactgcggcagcaaggaaatccttaccagcttccattacgatgcacaaagggagcctggatttgcagaagtgtaacatgtctccagttgtgaaaattgaacaagtgtttgctcttcagaatgctacaggggatgggaaatttatcgatcaatttgtttattcaacaaagggaattggtaacaaaacagaaataagtgtcagggggcaagacaggcttataatttctacaccaaaccagagaaatgaaaagccaacgcagagtgtatcatctcctgaagcaacatctggttctacaggctcagtagaaaagaagcaacagagaagatcaattagaactcgttctgaatcagagaaatccactgaggttgtgccaaagaagaagatcaaaaaggagcaggttgaaacagttcctcaggctacagtgaagactggattacagaaaggtgccagcgagatttcagattcctgtaaacctctaaagaaaaggagtcgcgcctcaactgatgtagaaatgactagttcagcatacagagacacatctgactccgattctagaggactgagtgacctgcaggtaggctttggaaagcaagtagatagcccttcagctactgcagatgcagacgtttctgatgtgcagtccatggattcaagtttgtcgagaagaggcactggaatgagtaagaaggacactgtatgtcagatttgtgaaagctctggtgactctctgattccttgtgagggagagtgctgcaaacactttcacctggagtgcctgggattggcatcacttcctgatagcaagttcatctgcatggaatgtaaaactgggcagcacccatgtttttcgtgtaaagtgtctggtaaagatgtgaagcgttgttctgttggtgcttgtgggaaattttatcatgaagcctgtgtccgcaaattccccactgccatctttgaatcaaaaggattccgctgtcctcagcactgctgctctgcctgctctatggagaaagatatccacaaagcaagtaaaggccgcatgatgagatgtttaagatgtccagttgcctatcactctggagatgcttgcattgcggccggaagcatgttagtatcctcctacattctcatctgtagtaatcattccaaacggagcagtaattcttctgctgtaaatgtaggcttttgtttcgtttgtgccagagggctgatagttcaggaccattcagaccccatgttcagttcatatgcctataagtcccactacctactgaatgaatcaaatcgtgctgagttgatgaaattacctatgattccttcttcgtcagcttccaaaaagaaatgtgagaaaggtggaagattgctctgctgtgaatcgtgcccagcttccttccacccggaatgcctaagcatagaaatgccagaaggctgctggaattgtaatgactgtaaagctggcaagaaactacattacaagcagattgtttgggtcaaattgggaaattacagatggtggccagcagagatctgcaaccccaggtctgtgccactgaacatccagggccttaaacatgacttgggggacttccctgtattcttctttggttctcatgactactactgggtacaccagggcagagtgttcccttatgttgaaggagacaaaagctttgctgaagggcagactagtattaacaagaccttcaaaaaggcactggaagaagctgcaaaacgtttccaggaattgaaagcacaaagagaaagtaaagaagccctagagattgaaaaaaactcaagaaaaccccctccctacaaacacatcaaagctaacaaagtaataggaaaggtgcagatccaggttgctgacctgtcagagattccccgctgtaactgcaagccagctgatgaaaacccttgtggcttggaatcggagtgcctgaacagaatgttgcagtatgaatgccacccgcaggtgtgcccagctggagatcgttgtcagaaccagtgctttacaaagagactataccctgatgcagagatcatcaaaacggagcggagaggctggggcctcaggaccaaaaggagcattaagaagggtgaatttgtaaatgaatacgtcggtgaattaattgatgaagaagaatgcagattgcgaatcaagcgagcccacgagaacagtgtaactaatttttatatgttaactgttaccaaggaccgtataattgatgccggcccaaaaggaaattattctcgcttcatgaaccacagttgtaatcccaactgtgaaacacaaaagtggacagtgaatggagatgttcgagtgggactatttgctctctgtgatattcctgcagggatggagttaacatttaattataacctagattgtctgggcaacggcagaacggagtgccactgtggagcagataactgcagtggttttctaggagtgcggccaaagtcggcatgtgcgtcaacaaatgaagagaaggcaaaaaatgctaagttaaaacagaagagacgaaagatcaaaacagaaccaaagcagatgcatgaagattactgttttcaatgtggagatggtggagagctggtcatgtgtgacaaaaaagactgtcccaaagcataccacctcctatgccttaacctgactcagccaccatatggaaagtgggagtgtccgtggcatcagtgcgatgagtgcagcagtgcagctgtttccttctgtgaattctgtccacattcattttgtaaagatcatgaaaagggggccctggttccctctgcactggaaggccgcctctgctgctcggaacatgaccccatggctcctgtgtcaccagaatactggagcaagataaaatgtaaatgggaatcacaagatcatggagaagaagtaaaagaataaatgtgtggtgtcccctcctttctatttaagtgaaaaaagcaaatagatcatgcatttaaaaagaagagactgctacagtgcatacagcctttgccatcggaactgccttattaaagcaaaaatgggaaaccagttcatgcaggcagaagcagttggtggtgtctggtttttgtttgatttggttggtttgggattcttttgtggagggttaaattcccttggtcttttcttgccttttattgtgcttcagtgccattgcagcttgaaaaagaaatgtttttgctgttaaaataagaacaaagagaaaagtaagttttgttaatgagataaatttaaagtctaagatgtgttccttggttgtataaagcaaaagtagccatcattcctttatttattttcatttttaggaatttcaagaagtgtagttcaatagtctaatcaagtgtgtgtgtgttttaagtaggaatctgagaaagccctctaggaaagggtatgataagctttatatacctctttactgagcagtaggtaggctcacttctctttcccttcaaaatgcttttcataggcttagagaagggctctatggaagtattaaa

SEQ ID NO: 10 - DNA, 6308 bp, Homo sapiens
tctttaagatttgtagctactaagaaagaaaggagctttttttccttgggccttcaaactgaaagaaccgcatgagcctgaagctgcgcatggtcttaacatcaggctgtgcaggaagaagctatctgcagatggatgccagcacacacaaggaagcagagctctggcaacattgagtcaaagcaaggacacaacatcagagggacggcagagaatccttgtgtgtagatctttggtggcagtttgaaaattgcaaggagggactttaagactacttctgatttgcaaagattgtctgtgctctgagcaggctgaagtgactggacgagacgcactgttggagaaataaaaatgacttcccattatgtgattgccatctttgccctgatgagctcctgtttagccactgcaggtccagagcctggtgcactgtgtgaactgtcacctgtcagtgcctcccatcctgtccaggccttgatggagagcttcactgttttgtcaggctgtgccagcagaggcacaactgggctgccacaggaggtgcatgtcctgaatctccgcactgcaggccaggggcctggccagctacagagagaggtcacacttcacctgaatcccatctcctcagtccacatccaccacaagtctgttgtgttcctgctcaactccccacaccccctggtgtggcatctgaagacagagagacttgccactggggtctccagactgtttttggtgtctgagggttctgtggtccagttttcatcagcaaacttctccttgacagcagaaacagaagaaaggaacttcccccatggaaatgaacatctgttaaattgggcccgaaaagagtatggagcagttacttcattcaccgaactcaagatagcaagaaacatttatattaaagtgggggaagatcaagtgttccctccaaagtgcaacatagggaagaattttctctcactcaattaccttgctgagtaccttcaacccaaagcagcagaagggtgtgtgatgtccagccagccccagaatgaggaagtacacatcatcgagctaatcacccccaactctaacccctacagtgctttccaggtggatataacaattgatataagaccttctcaagaggatcttgaagtggtcaaaaatctcatcctgatcttgaagtgcaaaaagtctgtcaactgggtgatcaaatcttttgatgttaagggaagcctgaaaattattgctcctaacagtattggctttggaaaagagagtgaaagatctatgacaatgaccaaatcaataagagatgacattccttcaacccaagggaatctggtgaagtgggctttggacaatggctatagtccaataacttcatacacaatggctcctgtggctaatagatttcatcttcggcttgaaaataatgaggagatgggagatgaggaagtccacactattcctcctgagctacggatcctgctggaccctggtgccctgcctgccctgcagaacccgcccatccggggaggggaaggccaaaatggaggccttccgtttcctttcccagatatttccaggagagtctggaatgaagagggagaagatgggctccctcggccaaaggaccctgtcattcccagcatacaactgtttcctggtctcagagagccagaagaggtgcaagggagcgtggatattgccctgtctgtcaaatgtgacaatgagaagatgatcgtggctgtagaaaaagattcttttcaggccagtggctactcggggatggacgtcaccctgttggatcctacctgcaaggccaagatgaatggcacacactttgttttggagtctcctctgaatggctgcggtactcggccccggtggtcagcccttgatggtgtggtctactataactccattgtgatacaggttccagcccttggggacagtagtggttggccagatggttatgaagatctggagtcaggtgataatggatttccgggagatatggatgaaggagatgcttccctgttcacccgacctgaaatcgtggtgtttaattgcagccttcagcaggtgaggaaccccagcagcttccaggaacagccccacggaaacatcaccttcaacatggagctatacaacactgacctctttttggtgccctcccagggcgtcttctctgtgccagagaatggacacgtttatgttgaggtatctgttactaaggctgaacaagaactgggatttgccatccaaacgtgctttatctctccatattcgaaccctgataggatgtctcattacaccattattgagaatatttgtcctaaagatgaatctgtgaaattctacagtcccaagagagtgcactttcctatcccgcaagctgacatggataagaagcgattcagctttgtcttcaagcctgtcttcaacacctcactgctctttctacagtgtgagctgacgctgtgtacgaagatggagaagcacccccagaagttgcctaagtgtgtgcctcctgacgaagcctgcacctcgctggacgcctcgataatctgggccatgatgcagaataagaagacgttcactaagccccttgctgtgatccaccatgaagcagaatctaaagaaaaaggtccaagcatgaaggaaccaaatccaatttctccaccaattttccatggtctggacaccctaaccgtgatgggcattgcgtttgcagcctttgtgatcggagcactcctgacgggggccttgtggtacatctattctcacacaggggagacagcaggaaggcagcaagtccccacctccccgccagcctcggaaaacagcagtgctgcccacagcatcggcagcacgcagagcacgccttgctccagcagcagcacggcctagcccaacccagcccaacccggcccaacccagcccagcccagctcagctcagctactgccaagggcaggaccaatggctgagcctcgtgtccagactcagagggctggattttggttcccttgtaaagacagagtgaatttcagtataaagatcacccgttgtattcaccccacacccagggctagtataaacatgaccctgggcttctgtaccacactagaattcatgtgagaaagctaaaatggtggtcttctccaccagcccctcacaggcttgggggttttcaatgtgaaacacatgccagtttttaaaatgctgctttgtccaggtgagaacatccataatttggggccctgagttttacccagactcaaggagttggtaaagggttaatagccagatagtagaaccagtgaggagatgcggccaaagattctttatatctgaaccaagatgtaaaacaagaaatgctttgaggctttctaagcgatcctcctgtctaatttgcacctttgtctggatgcacacttctgaccttgctgccacaacctgtggggtctgatgtgtcccttgatgggtgctgccctcagggactgcaccctgacaagtgttaaggcaacattcctttcttgtgccctgggccaaaaccaatgctgatgaccttatcagcttcctgtttcttcccatacttgcatacaccactgcaaaatgtcttaatgcaaattttgtatttcttacaggcctacagaaattgaaaatgaccaaaatcaggaaccacagatttgtgcccattcctaatattttgttctgcaaattaatgtataatttgaggtgaaattcagttataaagtcaaggacgaatttgcacagtgatatatttctatgtgtatgcaagtacaagtatataatatgtcacctggcacattcattttctcagttgaagaagagaaaatttgaaaatgtccttatgcttttagagttgcaacttaagtatatttggtagggtgagtgtttccactcaaaatatgtcaacttaaaaaaaaataggccctttcataaaaaccaaactgtagcaagatgcaaatgcatggcaaatcctgtcggtctccagttggttatctgaatagtgtcaccaattccaccaagacagtgctgagattggaaaagggcactcatttggattgccttacttctcttgccttaaatatatcccatatatttaatatgtcaaaaagggcttgaggtgaatttcattaaatggaataatatgatgccactttgcagctaaaataagctcagtgatacctccttgttaaaaaaaaaaaaaaaaaaaaagaatgccaggggggaattatcatgctaaattattttactgctgaagatagcttcattgcaaattattctttttccagaatttcccccaaacaacttagaattccataagtagaacaagatagattctacccccaaaatattcataagcaaatcccactgcccttaaaataaggaagttatgcctggttgtctgtgaatggaacctcagtaggtaatcctgatgaagcttaaaaccttagggcagtgtctacatgggaaacaagtatgtggaaattgacaatcatttttaccaaatcgttgagtaataatatgacttacctgatagatatacacattcaataaggaacatttttttttttcaataaggaacattttaactaaaacattactttagggctgagatttccaggctatctacattgatctactgaaaaatttctagatttccatatacaaacgaagaagacatgagtttagagaatttttttcctttaatttttttttaacagaagggtatcagagtggaggacctagattacgctacctgtgtttgaaaatattgcgctttgcctaaccttcggtggaatgtattgtttcagcatattctatgtataaaaaagtttaaagatgtcttcaaagaagactagagtctttaagtcacttatagctatattttactacaaaatttgtgtataaagatatatttaagtgttttagataaatttaagttactccatatgaaatgtttaatttcagctactgtgaattctttcgatcagtcctttgcttttttaaaaaatcttttccatcgtgttaaaaagaaaattagctattaggagatattaaaagattgatgtcttagaaggacagggttaaaaccttctgtaatatatttaaatatatatttttaagagagatgctacattgccaatgattttataaataatttaaaattaatttacaaatttatagatgcaaaccaaaagatctttttaaaagagagagagaggaaaaaaatcaccttttatttgtttgggtctcattgtcagaattattattcagatcaagaaatctgtgtcgataaaacctaatctcatattggagagtgaatgtcgttaagtatttctgaaatgtttctaaaaaatgaacatgaaaaaaataaggtattttctccctagcttctcattacagtatttctaattgcttcacactttacagttttaatacaaagtacaagctctacttttataacgtgtactacaagtttctttaaaagtattgttgtatttcagctgaactcttgtatctgcagtcttttgttatttctgcaggctacacccttaatttgcagaggccattttgttgtttgtttgatgctgaagctgttgttaaaatgccccaaactccaaggcagattgtctgtataatacgctatagcttttcaccatgtggtgtttaccagctgttactctgtattttaaaaagccagagatttcttctgtctaaactgtttctatagcattttctaaacaaaaaaaatggtttttttctttgccttgtaataagattgtaaatccatttcctgcttgtgttcttagtgggcatgattgtgagtgtgtgtggggtgctcacacgcgtgccagtctttttgtactgtaactacctcatggtttgaatgatgattgtactgctggttgtgttaacagagcacattttgttgggtgagtcctatgtgatttttttcatgtttgttttatctgggggttgttcatgaaactgacagatgtttttctaaaaaggactattatcagtttccaaatacaatacttctctcttctggtttttcctgaatgagcctgattttgttgctggttttcatcatctatgagggtaaaacgagtacccttaaaatccctgtggccagtttgaacacccctgttgtattcttttctctgttcagtgtgtcagctattttgtgaagatgcttagatgtatagttttgataaccacagttttaaatcttttatctgtgcataataaaaagatatatatcagttattaaaaaaaaaa

SEQ ID NO: 11 - DNA, 6472 bp, Homo sapiens
gagagcccccggtggggccggcggaggagcgcccttccccccgcgcgctgattgctgtggcgtcctgcccgtccccgcccgcgtgtgtgcgagggagggcgagtgcgccgggtcggcctgatgggggtaatcgagggtttcggggacgccgagcggcactttcctcttcccagcgagtgaaggagggcagtcggcggctctcgcgccccggccactttccctgcgcgattcccggagctccctgcaggaggtgagagtccccagcgggtccggatggcgtagttttgccgcggcgcagcagctgccggagctcgccgccgccgagcgctgggcggggaaacttgccgccgctttcctccaacttgctgcgggtggatctccgctggacacaccgcctccgaggcagtttgaaaattgcaaggagggactttaagactacttctgatttgcaaagattgtctgtgctctgagcaggctgaagtgactggacgagacgcactgttggagaaataaaaatgacttcccattatgtgattgccatctttgccctgatgagctcctgtttagccactgcaggtccagagcctggtgcactgtgtgaactgtcacctgtcagtgcctcccatcctgtccaggccttgatggagagcttcactgttttgtcaggctgtgccagcagaggcacaactgggctgccacaggaggtgcatgtcctgaatctccgcactgcaggccaggggcctggccagctacagagagaggtcacacttcacctgaatcccatctcctcagtccacatccaccacaagtctgttgtgttcctgctcaactccccacaccccctggtgtggcatctgaagacagagagacttgccactggggtctccagactgtttttggtgtctgagggttctgtggtccagttttcatcagcaaacttctccttgacagcagaaacagaagaaaggaacttcccccatggaaatgaacatctgttaaattgggcccgaaaagagtatggagcagttacttcattcaccgaactcaagatagcaagaaacatttatattaaagtgggggaagatcaagtgttccctccaaagtgcaacatagggaagaattttctctcactcaattaccttgctgagtaccttcaacccaaagcagcagaagggtgtgtgatgtccagccagccccagaatgaggaagtacacatcatcgagctaatcacccccaactctaacccctacagtgctttccaggtggatataacaattgatataagaccttctcaagaggatcttgaagtggtcaaaaatctcatcctgatcttgaagtgcaaaaagtctgtcaactgggtgatcaaatcttttgatgttaagggaagcctgaaaattattgctcctaacagtattggctttggaaaagagagtgaaagatctatgacaatgaccaaatcaataagagatgacattccttcaacccaagggaatctggtgaagtgggctttggacaatggctatagtccaataacttcatacacaatggctcctgtggctaatagatttcatcttcggcttgaaaataatgaggagatgggagatgaggaagtccacactattcctcctgagctacggatcctgctggaccctggtgccctgcctgccctgcagaacccgcccatccggggaggggaaggccaaaatggaggccttccgtttcctttcccagatatttccaggagagtctggaatgaagagggagaagatgggctccctcggccaaaggaccctgtcattcccagcatacaactgtttcctggtctcagagagccagaagaggtgcaagggagcgtggatattgccctgtctgtcaaatgtgacaatgagaagatgatcgtggctgtagaaaaagattcttttcaggccagtggctactcggggatggacgtcaccctgttggatcctacctgcaaggccaagatgaatggcacacactttgttttggagtctcctctgaatggctgcggtactcggccccggtggtcagcccttgatggtgtggtctactataactccattgtgatacaggttccagcccttggggacagtagtggttggccagatggttatgaagatctggagtcaggtgataatggatttccgggagatatggatgaaggagatgcttccctgttcacccgacctgaaatcgtggtgtttaattgcagccttcagcaggtgaggaaccccagcagcttccaggaacagccccacggaaacatcaccttcaacatggagctatacaacactgacctctttttggtgccctcccagggcgtcttctctgtgccagagaatggacacgtttatgttgaggtatctgttactaaggctgaacaagaactgggatttgccatccaaacgtgctttatctctccatattcgaaccctgataggatgtctcattacaccattattgagaatatttgtcctaaagatgaatctgtgaaattctacagtcccaagagagtgcactttcctatcccgcaagctgacatggataagaagcgattcagctttgtcttcaagcctgtcttcaacacctcactgctctttctacagtgtgagctgacgctgtgtacgaagatggagaagcacccccagaagttgcctaagtgtgtgcctcctgacgaagcctgcacctcgctggacgcctcgataatctgggccatgatgcagaataagaagacgttcactaagccccttgctgtgatccaccatgaagcagaatctaaagaaaaaggtccaagcatgaaggaaccaaatccaatttctccaccaattttccatggtctggacaccctaaccgtgatgggcattgcgtttgcagcctttgtgatcggagcactcctgacgggggccttgtggtacatctattctcacacaggggagacagcaggaaggcagcaagtccccacctccccgccagcctcggaaaacagcagtgctgcccacagcatcggcagcacgcagagcacgccttgctccagcagcagcacggcctagcccaacccagcccaacccggcccaacccagcccagcccagctcagctcagctactgccaagggcaggaccaatggctgagcctcgtgtccagactcagagggctggattttggttcccttgtaaagacagagtgaatttcagtataaagatcacccgttgtattcaccccacacccagggctagtataaacatgaccctgggcttctgtaccacactagaattcatgtgagaaagctaaaatggtggtcttctccaccagcccctcacaggcttgggggttttcaatgtgaaacacatgccagtttttaaaatgctgctttgtccaggtgagaacatccataatttggggccctgagttttacccagactcaaggagttggtaaagggttaatagccagatagtagaaccagtgaggagatgcggccaaagattctttatatctgaaccaagatgtaaaacaagaaatgctttgaggctttctaagcgatcctcctgtctaatttgcacctttgtctggatgcacacttctgaccttgctgccacaacctgtggggtctgatgtgtcccttgatgggtgctgccctcagggactgcaccctgacaagtgttaaggcaacattcctttcttgtgccctgggccaaaaccaatgctgatgaccttatcagcttcctgtttcttcccatacttgcatacaccactgcaaaatgtcttaatgcaaattttgtatttcttacaggcctacagaaattgaaaatgaccaaaatcaggaaccacagatttgtgcccattcctaatattttgttctgcaaattaatgtataatttgaggtgaaattcagttataaagtcaaggacgaatttgcacagtgatatatttctatgtgtatgcaagtacaagtatataatatgtcacctggcacattcattttctcagttgaagaagagaaaatttgaaaatgtccttatgcttttagagttgcaacttaagtatatttggtagggtgagtgtttccactcaaaatatgtcaacttaaaaaaaaataggccctttcataaaaaccaaactgtagcaagatgcaaatgcatggcaaatcctgtcggtctccagttggttatctgaatagtgtcaccaattccaccaagacagtgctgagattggaaaagggcactcatttggattgccttacttctcttgccttaaatatatcccatatatttaatatgtcaaaaagggcttgaggtgaatttcattaaatggaataatatgatgccactttgcagctaaaataagctcagtgatacctccttgttaaaaaaaaaaaaaaaaaaaaagaatgccaggggggaattatcatgctaaattattttactgctgaagatagcttcattgcaaattattctttttccagaatttcccccaaacaacttagaattccataagtagaacaagatagattctacccccaaaatattcataagcaaatcccactgcccttaaaataaggaagttatgcctggttgtctgtgaatggaacctcagtaggtaatcctgatgaagcttaaaaccttagggcagtgtctacatgggaaacaagtatgtggaaattgacaatcatttttaccaaatcgttgagtaataatatgacttacctgatagatatacacattcaataaggaacatttttttttttcaataaggaacattttaactaaaacattactttagggctgagatttccaggctatctacattgatctactgaaaaatttctagatttccatatacaaacgaagaagacatgagtttagagaatttttttcctttaatttttttttaacagaagggtatcagagtggaggacctagattacgctacctgtgtttgaaaatattgcgctttgcctaaccttcggtggaatgtattgtttcagcatattctatgtataaaaaagtttaaagatgtcttcaaagaagactagagtctttaagtcacttatagctatattttactacaaaatttgtgtataaagatatatttaagtgttttagataaatttaagttactccatatgaaatgtttaatttcagctactgtgaattctttcgatcagtcctttgcttttttaaaaaatcttttccatcgtgttaaaaagaaaattagctattaggagatattaaaagattgatgtcttagaaggacagggttaaaaccttctgtaatatatttaaatatatatttttaagagagatgctacattgccaatgattttataaataatttaaaattaatttacaaatttatagatgcaaaccaaaagatctttttaaaagagagagagaggaaaaaaatcaccttttatttgtttgggtctcattgtcagaattattattcagatcaagaaatctgtgtcgataaaacctaatctcatattggagagtgaatgtcgttaagtatttctgaaatgtttctaaaaaatgaacatgaaaaaaataaggtattttctccctagcttctcattacagtatttctaattgcttcacactttacagttttaatacaaagtacaagctctacttttataacgtgtactacaagtttctttaaaagtattgttgtatttcagctgaactcttgtatctgcagtcttttgttatttctgcaggctacacccttaatttgcagaggccattttgttgtttgtttgatgctgaagctgttgttaaaatgccccaaactccaaggcagattgtctgtataatacgctatagcttttcaccatgtggtgtttaccagctgttactctgtattttaaaaagccagagatttcttctgtctaaactgtttctatagcattttctaaacaaaaaaaatggtttttttctttgccttgtaataagattgtaaatccatttcctgcttgtgttcttagtgggcatgattgtgagtgtgtgtggggtgctcacacgcgtgccagtctttttgtactgtaactacctcatggtttgaatgatgattgtactgctggttgtgttaacagagcacattttgttgggtgagtcctatgtgatttttttcatgtttgttttatctgggggttgttcatgaaactgacagatgtttttctaaaaaggactattatcagtttccaaatacaatacttctctcttctggtttttcctgaatgagcctgattttgttgctggttttcatcatctatgagggtaaaacgagtacccttaaaatccctgtggccagtttgaacacccctgttgtattcttttctctgttcagtgtgtcagctattttgtgaagatgcttagatgtatagttttgataaccacagttttaaatcttttatctgtgcataataaaaagatatatatcagttattaaaaaaaaaa

SEQ ID NO: 12 - DNA, 6475 bp, Homo sapiens
gagagcccccggtggggccggcggaggagcgcccttccccccgcgcgctgattgctgtggcgtcctgcccgtccccgcccgcgtgtgtgcgagggagggcgagtgcgccgggtcggcctgatgggggtaatcgagggtttcggggacgccgagcggcactttcctcttcccagcgagtgaaggagggcagtcggcggctctcgcgccccggccactttccctgcgcgattcccggagctccctgcaggaggtgagagtccccagcgggtccggatggcgtagttttgccgcggcgcagcagctgccggagctcgccgccgccgagcgctgggcggggaaacttgccgccgctttcctccaacttgctgcgggtggatctccgctggacacaccgcctccgaggcagtttgaaaattgcaaggagggactttaagactacttctgatttgcaaagattgtctgtgctctgagcaggctgaagtgactggacgagacgcactgttggagaaataaaaatgacttcccattatgtgattgccatctttgccctgatgagctcctgtttagccactgcaggtccagagcctggtgcactgtgtgaactgtcacctgtcagtgcctcccatcctgtccaggccttgatggagagcttcactgttttgtcaggctgtgccagcagaggcacaactgggctgccacaggaggtgcatgtcctgaatctccgcactgcaggccaggggcctggccagctacagagagaggtcacacttcacctgaatcccatctcctcagtccacatccaccacaagtctgttgtgttcctgctcaactccccacaccccctggtgtggcatctgaagacagagagacttgccactggggtctccagactgtttttggtgtctgagggttctgtggtccagttttcatcagcaaacttctccttgacagcagaaacagaagaaaggaacttcccccatggaaatgaacatctgttaaattgggcccgaaaagagtatggagcagttacttcattcaccgaactcaagatagcaagaaacatttatattaaagtgggggaagatcaagtgttccctccaaagtgcaacatagggaagaattttctctcactcaattaccttgctgagtaccttcaacccaaagcagcagaagggtgtgtgatgtccagccagccccagaatgaggaagtacacatcatcgagctaatcacccccaactctaacccctacagtgctttccaggtggatataacaattgatataagaccttctcaagaggatcttgaagtggtcaaaaatctcatcctgatcttgaagtgcaaaaagtctgtcaactgggtgatcaaatcttttgatgttaagggaagcctgaaaattattgctcctaacagtattggctttggaaaagagagtgaaagatctatgacaatgaccaaatcaataagagatgacattccttcaacccaagggaatctggtgaagtgggctttggacaatggctatagtccaataacttcatacacaatggctcctgtggctaatagatttcatcttcggcttgaaaataatgcagaggagatgggagatgaggaagtccacactattcctcctgagctacggatcctgctggaccctggtgccctgcctgccctgcagaacccgcccatccggggaggggaaggccaaaatggaggccttccgtttcctttcccagatatttccaggagagtctggaatgaagagggagaagatgggctccctcggccaaaggaccctgtcattcccagcatacaactgtttcctggtctcagagagccagaagaggtgcaagggagcgtggatattgccctgtctgtcaaatgtgacaatgagaagatgatcgtggctgtagaaaaagattcttttcaggccagtggctactcggggatggacgtcaccctgttggatcctacctgcaaggccaagatgaatggcacacactttgttttggagtctcctctgaatggctgcggtactcggccccggtggtcagcccttgatggtgtggtctactataactccattgtgatacaggttccagcccttggggacagtagtggttggccagatggttatgaagatctggagtcaggtgataatggatttccgggagatatggatgaaggagatgcttccctgttcacccgacctgaaatcgtggtgtttaattgcagccttcagcaggtgaggaaccccagcagcttccaggaacagccccacggaaacatcaccttcaacatggagctatacaacactgacctctttttggtgccctcccagggcgtcttctctgtgccagagaatggacacgtttatgttgaggtatctgttactaaggctgaacaagaactgggatttgccatccaaacgtgctttatctctccatattcgaaccctgataggatgtctcattacaccattattgagaatatttgtcctaaagatgaatctgtgaaattctacagtcccaagagagtgcactttcctatcccgcaagctgacatggataagaagcgattcagctttgtcttcaagcctgtcttcaacacctcactgctctttctacagtgtgagctgacgctgtgtacgaagatggagaagcacccccagaagttgcctaagtgtgtgcctcctgacgaagcctgcacctcgctggacgcctcgataatctgggccatgatgcagaataagaagacgttcactaagccccttgctgtgatccaccatgaagcagaatctaaagaaaaaggtccaagcatgaaggaaccaaatccaatttctccaccaattttccatggtctggacaccctaaccgtgatgggcattgcgtttgcagcctttgtgatcggagcactcctgacgggggccttgtggtacatctattctcacacaggggagacagcaggaaggcagcaagtccccacctccccgccagcctcggaaaacagcagtgctgcccacagcatcggcagcacgcagagcacgccttgctccagcagcagcacggcctagcccaacccagcccaacccggcccaacccagcccagcccagctcagctcagctactgccaagggcaggaccaatggctgagcctcgtgtccagactcagagggctggattttggttcccttgtaaagacagagtgaatttcagtataaagatcacccgttgtattcaccccacacccagggctagtataaacatgaccctgggcttctgtaccacactagaattcatgtgagaaagctaaaatggtggtcttctccaccagcccctcacaggcttgggggttttcaatgtgaaacacatgccagtttttaaaatgctgctttgtccaggtgagaacatccataatttggggccctgagttttacccagactcaaggagttggtaaagggttaatagccagatagtagaaccagtgaggagatgcggccaaagattctttatatctgaaccaagatgtaaaacaagaaatgctttgaggctttctaagcgatcctcctgtctaatttgcacctttgtctggatgcacacttctgaccttgctgccacaacctgtggggtctgatgtgtcccttgatgggtgctgccctcagggactgcaccctgacaagtgttaaggcaacattcctttcttgtgccctgggccaaaaccaatgctgatgaccttatcagcttcctgtttcttcccatacttgcatacaccactgcaaaatgtcttaatgcaaattttgtatttcttacaggcctacagaaattgaaaatgaccaaaatcaggaaccacagatttgtgcccattcctaatattttgttctgcaaattaatgtataatttgaggtgaaattcagttataaagtcaaggacgaatttgcacagtgatatatttctatgtgtatgcaagtacaagtatataatatgtcacctggcacattcattttctcagttgaagaagagaaaatttgaaaatgtccttatgcttttagagttgcaacttaagtatatttggtagggtgagtgtttccactcaaaatatgtcaacttaaaaaaaaataggccctttcataaaaaccaaactgtagcaagatgcaaatgcatggcaaatcctgtcggtctccagttggttatctgaatagtgtcaccaattccaccaagacagtgctgagattggaaaagggcactcatttggattgccttacttctcttgccttaaatatatcccatatatttaatatgtcaaaaagggcttgaggtgaatttcattaaatggaataatatgatgccactttgcagctaaaataagctcagtgatacctccttgttaaaaaaaaaaaaaaaaaaaaagaatgccaggggggaattatcatgctaaattattttactgctgaagatagcttcattgcaaattattctttttccagaatttcccccaaacaacttagaattccataagtagaacaagatagattctacccccaaaatattcataagcaaatcccactgcccttaaaataaggaagttatgcctggttgtctgtgaatggaacctcagtaggtaatcctgatgaagcttaaaaccttagggcagtgtctacatgggaaacaagtatgtggaaattgacaatcatttttaccaaatcgttgagtaataatatgacttacctgatagatatacacattcaataaggaacatttttttttttcaataaggaacattttaactaaaacattactttagggctgagatttccaggctatctacattgatctactgaaaaatttctagatttccatatacaaacgaagaagacatgagtttagagaatttttttcctttaatttttttttaacagaagggtatcagagtggaggacctagattacgctacctgtgtttgaaaatattgcgctttgcctaaccttcggtggaatgtattgtttcagcatattctatgtataaaaaagtttaaagatgtcttcaaagaagactagagtctttaagtcacttatagctatattttactacaaaatttgtgtataaagatatatttaagtgttttagataaatttaagttactccatatgaaatgtttaatttcagctactgtgaattctttcgatcagtcctttgcttttttaaaaaatcttttccatcgtgttaaaaagaaaattagctattaggagatattaaaagattgatgtcttagaaggacagggttaaaaccttctgtaatatatttaaatatatatttttaagagagatgctacattgccaatgattttataaataatttaaaattaatttacaaatttatagatgcaaaccaaaagatctttttaaaagagagagagaggaaaaaaatcaccttttatttgtttgggtctcattgtcagaattattattcagatcaagaaatctgtgtcgataaaacctaatctcatattggagagtgaatgtcgttaagtatttctgaaatgtttctaaaaaatgaacatgaaaaaaataaggtattttctccctagcttctcattacagtatttctaattgcttcacactttacagttttaatacaaagtacaagctctacttttataacgtgtactacaagtttctttaaaagtattgttgtatttcagctgaactcttgtatctgcagtcttttgttatttctgcaggctacacccttaatttgcagaggccattttgttgtttgtttgatgctgaagctgttgttaaaatgccccaaactccaaggcagattgtctgtataatacgctatagcttttcaccatgtggtgtttaccagctgttactctgtattttaaaaagccagagatttcttctgtctaaactgtttctatagcattttctaaacaaaaaaaatggtttttttctttgccttgtaataagattgtaaatccatttcctgcttgtgttcttagtgggcatgattgtgagtgtgtgtggggtgctcacacgcgtgccagtctttttgtactgtaactacctcatggtttgaatgatgattgtactgctggttgtgttaacagagcacattttgttgggtgagtcctatgtgatttttttcatgtttgttttatctgggggttgttcatgaaactgacagatgtttttctaaaaaggactattatcagtttccaaatacaatacttctctcttctggtttttcctgaatgagcctgattttgttgctggttttcatcatctatgagggtaaaacgagtacccttaaaatccctgtggccagtttgaacacccctgttgtattcttttctctgttcagtgtgtcagctattttgtgaagatgcttagatgtatagttttgataaccacagttttaaatcttttatctgtgcataataaaaagatatatatcagttattaaaaaaaaaa

SEQ ID NO: 13 - DNA, 3363 bp, Homo sapiens
ggacgggcggaggggacgggaggcccagcggctccgggctccgctggctcgggcgtcggatcggagccgccggggcgcgggcggcccagagctggcctgaacctccaggacttcagcccttctaggagaatctgatcccaggtgagggaggtcacttggggtgtggcccagcaggcaggcgggactccagactgggaacggaagtcagccctgctggggctgggagctgaagcatctgttccttcctcgcgggtgtgagacaaggaagagtgatcattgccacaccaggagctgaagccatggcctcaaagcctgagaagagggtggcatcgtctgtctttatcaccctggcacccccgcgccgcgatgtggccgtggcggaggaagtgaggcaggcagtttgtgaggcccggcgtggccgcccctgggaggctcctgcccccatgaagacacccgaggctggcttggcggggaggcccagcccctggacaacccctggcagagctgcagccacagtgccggctgcacctatgcagctcttcaatggaggatgcccaccccctcctcctgtcctggatggtgaggacgtgcttcctgacctggacctcctcccaccccctccaccgccccctccagtgcttctgccttctgaagaggaggctcctgctccaatgggggcctcactcattgcagacttagagcagctgcacctgtccccgcccccgcccccaccacaggccccagcggagggaccttcagtccagcccggtcccctcaggcccatggaggaagagctgccacctcccccggcagaacctgttgagaaaggggcatccacagacatctgtgccttctgccacaagaccgtgtccccccgagagctggctgtggaggccatgaagaggcagtaccatgcccagtgcttcacgtgccgcacctgccgccgccagctggctgggcagagcttctaccagaaggatgggcgacccctctgcgaaccctgctaccaggacacactggagaggtgcggcaagtgtggcgaggtggtccgggaccacatcatcagggccctgggccaggccttccacccctcctgcttcacgtgtgtgacctgcgcccggtgcattggggatgagagctttgccctgggcagccagaacgaggtgtactgcctggacgacttctacaggaaattcgcccccgtctgcagcatctgtgaaaatcccatcatccctcgggatgggaaagatgccttcaaaatcgaatgcatgggaagaaacttccatgaaaattgctacaggtgtgaggactgcaggatcctcctgtctgtcgagcccacggaccaaggctgctaccccctgaacaaccatctcttctgcaagccatgccatgtgaagcggagtgctgcggggtgctgctgagagtgcccgctgggcagtgaacagaccactagccccggctggggcccttccctgacttggtttcccttcctaacctgctcttgcacactttccttctgagcctccatggagaccagcctgcaagccggcccagcctgtccaggatacagtggggctgagcacccccaggccttccactcctctaccctctgggcaccagaaggctcctggaccatgagcttcacccccagaattccctgctgaccctgccccacttccagggaaaagctgggggaggttggacccctctcactgactagctgtctggtaggggtgctaggaccagcctcgcctgtggggttgagctgtttgaggacaaactccaaggtcccttaaaaagtgccttttagaggctgggcatggtggctcacgcttgtaatcccagcactttgggaggccaaggtgggtggatcacctgaggtcaggagttcaagaccagcctggccaacatggtgaaaccctgtctctactaaaaatacaaaaattagccaggcatggtagcaggtgcctgtaatcccagctactggggaaagctgaggcaggagaattgcttcaatctggaaggcagaggttgcagtgagattgcaccattgcattccagcctgggcaacaagagggaaactccgtctcaaaaaaaaaaaagtgccttttaggccggatgtggtggctcatgcctgtaatcccagcactttgggaggccaaggcaggcagatcacttgaggtcaggagtttgagaccagcctggccaacacggcaaaaccccgtttctactaaaaatacaaaaattagctgggtgtggtggcgtgcgcctgtaatcccagctactcaggaggctgaggcaggagcattgcttgaacccgggaggcagaggttgcagtgagctgagatggcaccactgcactccagcctgggagacacagcgagactctgtctccaaaaaaaaaagtgctttttgaaaatgttgaggttgaaatgatgggaaccaacattctttggatttagtggggagcataatagcaaacacccccttggttcgcacatgtacaggaatgggacccagttggggcacagccatggacttccccgccctggaatgtgtggtgcaaagtggggccagggcccagacccaagaggagagggtggtccgcagacaccccgggatgtcagcatcccccgacctgccttctggcggcacctcccgggtgctgtgttgagtcagcaggcatggggtgagagcctggtatatgctgggaacagggtgcaggggccaagcgttcctccttcagccttgacttgggccatgcaccccctctcccccaaacacaaacaagcacttctccagtatggtgccaggacaggtgtcccttcagtcctctggttatgacctcaagtcctacttgggccctgcagcccagcctgtgttgtaacctctgcgtcctcaagaccacacctggaagattcttcttccctttgaaggagaatcatcattgttgctttatcacttctaagacattttgtacggcacggacaagttaaacagaatgtgcttccctccctggggtctcacacgctcccacgagaatgccacaggggccgtgcactgggcaggcttctctgtagaaccccaggggcttcggcccagaccacagcgtcttgccctgagcctagagcagggagtcccgaacttctgcattcacagaccacctccacaattgttataaccaaaggcctcctgttctgttatttcacttaaatcaacatgctattttgttttcactcacttctgactttagcctcgtgctgagccgtgtatccatgcagtcatgttcacgtgctagttacgtttttcttcttacacatgaaaataaatgcataagtgttagaagctcaaaaaaaaaaaaaa

SEQ ID NO: 14 - DNA, 1521 bp, Homo sapiens
tggcctgaacctccaggacttcagcccttctaggagaatctgatcccaggtgagggaggtcacttggggtgtggcccagcaggcaggcgggactccagactgggaacggaagtcagccctgctggggctgggagctgaagcatctgttccttcctcgcgggtgtgagacaaggaagagtgatcattgccacaccaggagctgaagccatggcctcaaagcctgagaagagggtggcatcgtctgtctttatcaccctggcacccccgcgccgcgatgtggccgtggcggaggaagtgaggcaggcagtttgtgaggcccggcgtggccgcccctgggaggctcctgcccccatgaagacacccgaggctggcttggcggggaggcccagcccctggacaacccctggcagagctgcagccacagtgccggctgcacctatgcagctcttcaatggaggatgcccaccccctcctcctgtcctggatggtgaggacgtgcttcctgacctggacctcctcccaccccctccaccgccccctccagtgcttctgccttctgaagaggaggctcctgctccaatgggggcctcactcattgcagacttagagcagctgcacctgtccccgcccccgcccccaccacaggccccagcggagggaccttcagtccagcccggtcccctcaggcccatggaggaagagctgccacctcccccggcagaacctgttgagaaaggggcatccacagacatctgtgccttctgccacaagaccgtgtccccccgagagctggctgtggaggccatgaagaggcagtaccatgcccagtgcttcacgtgccgcacctgccgccgccagctggctgggcagagcttctaccagaaggatgggcgacccctctgcgaaccctgctaccaggacacactggagaggtgcggcaagtgtggcgaggtggtccgggaccacatcatcagggccctgggccaggccttccacccctcctgcttcacgtgtgtgacctgcgcccggtgcattggggatgagagctttgccctgggcagccagaacgaggtgtactgcctggacgacttctacaggtacgagaagggtttgtgcactgggtggggtgcagggacagggcgagacccaagcagggtgaaggagctgagcttgagtcctgggtgctgggccagagtttcctgtctactggtttattataaagaatattacagggctgggctgggcgcggtggctcacgcctgtaatcccagcactttgggaggccgaggcgggtggatcacgaggtcaggagatcgagatcatcctggctaacatggtgaaaccccgtctctactaaaaatacaaaaaaaattagccaggcatggtggcgggcgcctgtagtcccagctactcgggaggctgaggcaggagaatggcgtgaacctgggaggcagagcttgcagtgagccgagatcacgccactgcactccagcctgggcaacagagtgtgagactccgtct

SEQ ID NO: 15 - DNA, 2793 bp, Homo sapiens
ccacaccaggagctgaagccatggcctcaaagcctgagaagagggtggcatcgtctgtctttatcaccctggcacccccgcgccgcgatgtggccgtggcggaggaagtgaggcaggcagtttgtgaggcccggcgtggccgcccctgggaggctcctgcccccatgaagacacccgaggctggcttggcggggaggcccagcccctggacaacccctggcagagctgcagccacagtgccggctgcacctatgcagctcttcaatggagacatctgtgccttctgccacaagaccgtgtccccccgagagctggctgtggaggccatgaagaggcagtaccatgcccagtgcttcacgtgccgcacctgccgccgccagctggctgggcagagcttctaccagaaggatgggcgacccctctgcgaaccctgctaccaggacacactggagaggtgcggcaagtgtggcgaggtggtccgggaccacatcatcagggccctgggccaggccttccacccctcctgcttcacgtgtgtgacctgcgcccggtgcattggggatgagagctttgccctgggcagccagaacgaggtgtactgcctggacgacttctacaggaaattcgcccccgtctgcagcatctgtgaaaatcccatcatccctcgggatgggaaagatgccttcaaaatcgaatgcatgggaagaaacttccatgaaaattgctacaggtgtgaggactgcaggatcctcctgtctgtcgagcccacggaccaaggctgctaccccctgaacaaccatctcttctgcaagccatgccatgtgaagcggagtgctgcggggtgctgctgagagtgcccgctgggcagtgaacagaccactagccccggctggggcccttccctgacttggtttcccttcctaacctgctcttgcacactttccttctgagcctccatggagaccagcctgcaagccggcccagcctgtccaggatacagtggggctgagcacccccaggccttccactcctctaccctctgggcaccagaaggctcctggaccatgagcttcacccccagaattccctgctgaccctgccccacttccagggaaaagctgggggaggttggacccctctcactgactagctgtctggtaggggtgctaggaccagcctcgcctgtggggttgagctgtttgaggacaaactccaaggtcccttaaaaagtgccttttagaggctgggcatggtggctcacgcttgtaatcccagcactttgggaggccaaggtgggtggatcacctgaggtcaggagttcaagaccagcctggccaacatggtgaaaccctgtctctactaaaaatacaaaaattagccaggcatggtagcaggtgcctgtaatcccagctactggggaaagctgaggcaggagaattgcttcaatctggaaggcagaggttgcagtgagattgcaccattgcattccagcctgggcaacaagagggaaactccgtctcaaaaaaaaaaaagtgccttttaggccggatgtggtggctcatgcctgtaatcccagcactttgggaggccaaggcaggcagatcacttgaggtcaggagtttgagaccagcctggccaacacggcaaaaccccgtttctactaaaaatacaaaaattagctgggtgtggtggcgtgcgcctgtaatcccagctactcaggaggctgaggcaggagcattgcttgaacccgggaggcagaggttgcagtgagctgagatggcaccactgcactccagcctgggagacacagcgagactctgtctccaaaaaaaaaagtgctttttgaaaatgttgaggttgaaatgatgggaaccaacattctttggatttagtggggagcataatagcaaacacccccttggttcgcacatgtacaggaatgggacccagttggggcacagccatggacttccccgccctggaatgtgtggtgcaaagtggggccagggcccagacccaagaggagagggtggtccgcagacaccccgggatgtcagcatcccccgacctgccttctggcggcacctcccgggtgctgtgttgagtcagcaggcatggggtgagagcctggtatatgctgggaacagggtgcaggggccaagcgttcctccttcagccttgacttgggccatgcaccccctctcccccaaacacaaacaagcacttctccagtatggtgccaggacaggtgtcccttcagtcctctggttatgacctcaagtcctacttgggccctgcagcccagcctgtgttgtaacctctgcgtcctcaagaccacacctggaagattcttcttccctttgaaggagaatcatcattgttgctttatcacttctaagacattttgtacggcacggacaagttaaacagaatgtgcttccctccctggggtctcacacgctcccacgagaatgccacaggggccgtgcactgggcaggcttctctgtagaaccccaggggcttcggcccagaccacagcgtcttgccctgagcctagagcagggagtcccgaacttctgcattcacagaccacctccacaattgttataaccaaaggcctcctgttctgttatttcacttaaatcaacatgctattttgttttcactcacttctgactttagcctcgtgctgagccgtgtatccatgcagtcatgttcacgtgctagttacgtttttcttcttacacatgaaaataaatgcataagtgttagaagctcaaaaaaaaaaaaaa

SEQ ID NO: 16 - DNA, 8211 bp, Homo sapiens
gtcccccgcctgcctgaggacccccgcgcaccccagagacggcgcgcgcccagagcgcgggagcccggagcgccgggcgcctgggaccccgcggagccgctgcccagcccgtggggctcggcgggaatgcaggctgcgctgtgaacccgggcgccaaggccatgtccggcgctcgctgccggaccctgtaccccttctccggggagcggcacggccaggggctgcgcttcgccgcgggcgagctgatcacgctgctgcaggtcccggacggcggctggtgggaaggcgagaaggaggacgggctccgtggctggttcccggcgagctacgtgcagttgctggagaagcctggaatggtcccccctccgccgggagaagaaagccagacggtcatccttccacctggctggcagagctacctgtcgcctcagggccggcggtactatgtcaacacgaccaccaatgagaccacctgggaacgtcccagcagttctcctgggattccagccagccctggctctcacaggagctctctgcctccaacagtgaatggataccacgcatcagggaccccagcgcaccctccagagactgcccacatgagtgtccgaaaatccaccggtgattcccagaacctgggatcctcatcgccaagcaaaaagcagagcaaggaaaacaccatcacaataaactgtgtgacgttccctcacccagacacgatgccggaacagcagctgctgaaaccaaccgagtggagctactgcgactacttctgggctgataagaaggacccccaaggcaacggcaccgtggctgggtttgaactactgctccagaaacagctgaagggcaaacaaatgcagaaggaaatgtcagaattcatccgggaaaggataaagattgaagaagactatgcgaagaacttagctaagctctctcagaactccttggcttcacaggaggaaggctccttgggagaggcgtgggcccaggtgaagaagagcctggcggacgaagcagaagttcacctcaagttctctgccaagcttcacagcgaggtggagaagcccctgatgaacttccgtgagaacttcaagaaagacatgaagaagtgcgaccaccacattgccgaccttcgcaagcagctcgccagccgctatgcctcggtggagaaggcccggaaagccctcacagagcggcagagagacctggagatgaagacccagcagctggagatcaagctgagcaacaagacagaggaggacatcaagaaggcgcggagaaagtccacacaggctggagacgacctcatgcgctgtgtggatctctacaaccaggcccagtccaaatggtttgaagagatggtgaccaccacattggagctagagcggctggaggtggagagggtagagatgatccggcagcacctgtgccagtacacgcagctgcggcatgaaacagacatgttcaaccaaagcacagtcgagcccgtggatcagctgcttcgaaaagtggacccggccaaagacagggagctgtgggtcagagagcacaagacgggcaacatccgccctgtggacatggagatctagatgggcctgtgcagcttcggggggtcctgctggggaggggggctgggctcccaccatggggcccatgccgagtggatgccccccaccctctctcctgggccactgaggagaggggagagagctggtgattccagaagggtgacccggacagcctagctgggggctcccccatattcccaggcccagaagacagacccacagccctgcccttgtctctgaggctgaagaccccctgactcccatgctgtgcttgccgctctgaaacaaacagaggctggaactttgtggtccttgccgagttttgtaggggtcactgtcacatgcttgtgccctggaagccccaaggctcttcctccagctggctcccttgtctccagggctttggaggatcagggtagggagggctctgtctctaagccaggtgtcaggatcagaatcatgggtagaaggtgccattcagctcacagccgcacccagaatcctttgcagccctccttctttatttttttcccattgcattctgggagtccacatctggctttctcagccactgttcatcaccaggggttttaggaggaaggcttggctcctgtcttcccagacccaccatgcctggagaggtcaggatggaactacctcattcggcaaattagccccaaattgagcgctgaatcgtgtcccatgagatcaggcgccatctgtaaagtctcctctggaaatgccaatccatccttcccccagctgcttcctcggggaggcccctgcccccaccctgccagcccttcccagtctcattagaggaagctttccaaagttctcagttatcaagacctcatccagctcgtccaaaggcttcagggatggaaacaaaccagctcgtctcagaggccagcaagctggggcctgtccgccacggtgccctgtgcacctttgggctgccctggcccccactctcccgggccgcccaccacaggctcttaatggggccgggtcagtcctacatgtgagatgggttagggcaagtctttgccatcccccagatggctctgtcttcttgtgtatggcagggctgggactgctgtcccttgtacagttttctgtcactggtgggcactggacaggcatagcagactctcttgtggccacactaggttgtcgcctttcaggcagtgtcccgccacctttgcttcccgctccttctggacattccagagccctgcaccaaacccttacttggtgtctgcacctcctttccctctctccatcttccaatccctggaaaagtctggtctgagtgtgacttgggaagctttcagtgctgctgtttggcccagctcattactttctccctttctctaccacagcaaacacattctccaccatgtcagtctaaagagtctaaaggggccgggagaagcatgagcgaggggcagattctagtcgggagcccatgccctggaaatccatctttcttcatctttcccattgaccactttgggtttgacctgcacatctgcagtgagggcagaattcaacaagcacaactcactggtctttcagtcaacgtgctagaaaccgatgacttattaatctctaattttttggcgcctctttcattgaatgagaattgctttcgtatagttcacattagaaaaatgcctaatatactaaagtaaaccaaacgttgtcacttttctcttgttcttgaaacattgcaaccaaaaaggtcagcacaaaggccttcacctacgtgaagacctcctggtaggatctgtccatgggatggagaaccactctgtccagatctggggttgggtcatgacaccagctaccaattttagaatattatttcttggtttctttatgaaaaatgggtgctagtggtaattgctttgtggcttagtaaactactctgtggatgatttccaaacattcaaagccaatagccttgttattaacaagatattttgagtacaatatggctcattgacttttccattacatctgaggattccagagtcctctgttcatccctgggatagagtgagccctcttgcgtcttccagggtagctcaggttggcccagtttgggccagtccatttttggaggtcactctttcccccctcatcccctcacctccttctctttacccccttcacgtacttcctttctttcttccctctgttattcattcatcaagcaggttaaagccattgtgctaagatctaatctgaggacactataatggccctgtcgtcagggaagcccgtgatcgctcgttttcaggggtcttaccggtcagcaaccttggcattgatacataggcactctacagaatttaagttttcagaggtaagtctgttgttctgattaatctgcattcattcagcgaatgctcaagacaagccaggcatgctgagaagcggcgctctagttgtatgtaagatgggcattcctctgctctcctctattctccatgtcgactgagaagagtataataagaacattgtaccctctccacacttaaccctctgggattctttattataatataaaccaccgtcgtgaggcatttacctgttggatggaaggtagacagcaacaagattttaatcacctggtcaccagaccctcacggcccatatccaattcgaatttcagaaatttctctgtttgctttaaataactctttacaaataagggtcgggcacggtggctcacgcctgtaatcccagctctttgggaggccgaggtgggcagatcacgaggtcaggagatcgagaccatcctggctaacatggtgaaaccccgtctctgctaaaaatacaaaaaattagccagatgtggtggtgcacacctgtagtcccaactattcggcaggctgaggcagtagaatcgcttgaacctgggaggcggagattgcagtgaaccaagatcgggccactgcactccagcttgggtgacagagcaagactccatctcaaaaaaattataaataactctttgcaaataggaaagtgaagctcaagggtaaccagtgaggctatgaaattgccagtgaattaagaccagggctagagtcaacagtccagaacccctatccgtatgaacaggggcccgtttctggttgaaatcaaggttaggatgcaactgagaaaataaaagactgcactttggagaggcaagcacgctatccgggttgttgttttgttttatgtcttggtgcttaggtgaggacttagctgggtttattcaaagtgggcgggtctgggctattcttgagaatgtcccttccatttctgagaacaagtcagccccttctacctgcctccacccaggagactgatgcacaagatctgtttgtgaaagcctgatttaaaaagaaaaaaaaaattccttaagccaaatggtgttccaagttggttgctgtgacaacctccaggaagagccacttgttaccctctattctttctagtgctttcagtcagtggcaacacataggccccttggaccgtggggatggcggccctgagattctgtcagtgggaccaccctgggcctcctttctacctccactcagcaccctgttggccaaggagaatttctgcggtgggaggcagtgctctgctagtcaggattgataaacagctgggcacaccgaaacagtgtaccaacgaattcaccaaccaggggtttctttccctaccctttgtgaaaaccaatcaattactagatgagtggatggatgcagaaaaatctgggctgagccaaagtcccttttggaaatacaagccataacattcgaaggacatcagcgaccttggcttgtttaggtgattttacttccagctgcaggtagtcttgacaaggagtgtttaaacagaaggctcaagatgcattccttgtgtaggtcggagagagcacttctaatgttaagtggggtacagatcagctgcccccccacgtagcctggacatcgtcttatccccataatccttgccatccctacaaggcccatcgccaccaccttttcccaggtttattgaggtatgattgacatccagtaaaattcaccctttggaaatatacagctctgtgaattttgacaaatttagtgtcttgtgaccatcaccaagatcaacctgtttttaaccctccaaaaaattcccttctcctgccctctttccctggcaaccctgattgattatctgatcctataattttgccttttctagaatgtcatataaatggagtcacactgatgtcgccttttgagtctggcatctttccctcagcttaatgcttttgagtcattcatgatgtgtgcgtgtggtttgttccttctccttgccgggaagtatttcattgcatgggcgtactactctgcttctttatttttacactgagcctttcgccctggaagttcttggcccagggtcttcaacttgtttgcacgaccacttccagcttgctgcttccttcagttccccaggctcctcctccaaatgccagctgtgcccacaagctgttcttagggctcacactcgccttttggcgcgtggtgggtttttggtagtgcagaaagaatccagggatgggaggggaagggacggatgggtgctcaattgctgctcacgtctgctgcaacctgaagcttgcatctcagccagcagatctgctcccttctgggacccaggcttcagtgtcacacggtccttggctatgtattgggcgttggaggctttgaaaggcgagcagaagcagcatggacaagaaggctggggctggccctggggctcatcatgatgctttcctggatctgttgcttcatctgcaagctgagggtgtttgttctagatgagtgtctcaggccaccggcaactgcatgtacctcctccctttctcatttccaatgatgtaccctgtacacgtgttcatgctgtgtctggctctcatctgcacaatcgtgcatagaattgcctcaagtcctggtgagagagatgccgtggtacttttccatttagattcaaatggagctaaaattaagagttttatgagctgttaagaatgaggtagtttctcctaggaccccccaaagacagtgcaagtaatgaccgtttggatctcattcgtcgatctttgatagtatgttctggagtctactccccaggagccaggacaggcgtgaagatggagtccttgtcgcagctggagccttgcctagctggtgatcacacagcctggcctgtacctgcaccccactggatggtggtacatggtggcagggacaggaccacacccagttaaggccagaccaggctgagtgtgacccctgaggtaaacactccactaagctgtgtcttgttcatgccccctgctcagtgaaaggtgagtcccgagaccagttgggtacctctctatgcgaaccagagacatttctggatccaggccaggtgaagattagggccaggaagcctgagcccccggggcctcaaggtagggagccgaagaggctgccaggactctgctgggttgaaatttgccggggaggactcttgtctccccctcaggagtatttttgttgaggctttcctggaggtgaagaagcaattcccattgcagcaggttagagcgagaatcagacagagggcaaaaaccaattcgcttctccccacgttctaaatgctggggcatggctgtcaggagggcttcctgggaggtgtctctgggggtggggtgaggttggggcgatggcctttggagattgcgtgtggtgttcaggactgttccttggtgtttgagggaaactttagtgggattgcagtggaatgtaaggtcagggcacgtgggtgctctctcggggtggggtgactgggagacctagagggaaagcctgctatgcagggggagagcacaggactggccctgctctgcggcctcctttgtcccataacctgaagttaagtcacatcccctgtcgggacctccgtgcactcatctgtcaagtgggggcgcttcccttccagcatcacctgcagcagacgggctctcgggagtcgtgggttccaggcagctgtgtggacccagggacagacattcaaagggacgccagccatccttagtgacaggggccccaacttagcatcccttcccttccgttaggaaggagatgaccggaagcaaccccttcacagacacgagcacatcggcaaaccctatgaaagtggaattttctaacaaaataaacttgcttgtttgatctgttttctgtaacttttgctaaatactttatacatttttcatgttaaagagccgtgtctcccgccagcactcctcaccccggtatgaatgtgtttcctccacattgtatatccttccaccctctggctgcctagatcagtaaataaaattgatgtaatataatttataagtaacactgttgaaaccctgatcccagtggaggctgtaacccacctgcccccgcaccacccccctgacccctgttaccgcatttgtgtgtattaatgctgaagaattaaatgtttaaagagtttaaattttgaaggcgtttgctatatacagttgtcctgcattattataaagagttttcaggaagtt

SEQ ID NO: 17 - DNA, 8181 bp, Homo sapiens
agaaacattgcatctggaaagtccagaacaagttgttaatttcccagcaagcactggagcggatttggaaggaactatgcaatgtagtgggttctttgtgaaagaacagcaatgagcaaagccacaggaacctccgctggggtgcccagaacactggccctgggctagcgacttgcctcagccccatttcccggagaggctgccatgaagaggaagccggcggagtcttggtgctgagtctgagggcttcaggcaggacccaagactctcctctgaggtagcagcccccagagaaggttagctgttctctgatgaagcctggaatggtcccccctccgccgggagaagaaagccagacggtcatccttccacctggctggcagagctacctgtcgcctcagggccggcggtactatgtcaacacgaccaccaatgagaccacctgggaacgtcccagcagttctcctgggattccagccagccctggctctcacaggagctctctgcctccaacagtgaatggataccacgcatcagggaccccagcgcaccctccagagactgcccacatgagtgtccgaaaatccaccggtgattcccagaacctgggatcctcatcgccaagcaaaaagcagagcaaggaaaacaccatcacaataaactgtgtgacgttccctcacccagacacgatgccggaacagcagctgctgaaaccaaccgagtggagctactgcgactacttctgggctgataagaaggacccccaaggcaacggcaccgtggctgggtttgaactactgctccagaaacagctgaagggcaaacaaatgcagaaggaaatgtcagaattcatccgggaaaggataaagattgaagaagactatgcgaagaacttagctaagctctctcagaactccttggcttcacaggaggaaggctccttgggagaggcgtgggcccaggtgaagaagagcctggcggacgaagcagaagttcacctcaagttctctgccaagcttcacagcgaggtggagaagcccctgatgaacttccgtgagaacttcaagaaagacatgaagaagtgcgaccaccacattgccgaccttcgcaagcagctcgccagccgctatgcctcggtggagaaggcccggaaagccctcacagagcggcagagagacctggagatgaagacccagcagctggagatcaagctgagcaacaagacagaggaggacatcaagaaggcgcggagaaagtccacacaggctggagacgacctcatgcgctgtgtggatctctacaaccaggcccagtccaaatggtttgaagagatggtgaccaccacattggagctagagcggctggaggtggagagggtagagatgatccggcagcacctgtgccagtacacgcagctgcggcatgaaacagacatgttcaaccaaagcacagtcgagcccgtggatcagctgcttcgaaaagtggacccggccaaagacagggagctgtgggtcagagagcacaagacgggcaacatccgccctgtggacatggagatctagatgggcctgtgcagcttcggggggtcctgctggggaggggggctgggctcccaccatggggcccatgccgagtggatgccccccaccctctctcctgggccactgaggagaggggagagagctggtgattccagaagggtgacccggacagcctagctgggggctcccccatattcccaggcccagaagacagacccacagccctgcccttgtctctgaggctgaagaccccctgactcccatgctgtgcttgccgctctgaaacaaacagaggctggaactttgtggtccttgccgagttttgtaggggtcactgtcacatgcttgtgccctggaagccccaaggctcttcctccagctggctcccttgtctccagggctttggaggatcagggtagggagggctctgtctctaagccaggtgtcaggatcagaatcatgggtagaaggtgccattcagctcacagccgcacccagaatcctttgcagccctccttctttatttttttcccattgcattctgggagtccacatctggctttctcagccactgttcatcaccaggggttttaggaggaaggcttggctcctgtcttcccagacccaccatgcctggagaggtcaggatggaactacctcattcggcaaattagccccaaattgagcgctgaatcgtgtcccatgagatcaggcgccatctgtaaagtctcctctggaaatgccaatccatccttcccccagctgcttcctcggggaggcccctgcccccaccctgccagcccttcccagtctcattagaggaagctttccaaagttctcagttatcaagacctcatccagctcgtccaaaggcttcagggatggaaacaaaccagctcgtctcagaggccagcaagctggggcctgtccgccacggtgccctgtgcacctttgggctgccctggcccccactctcccgggccgcccaccacaggctcttaatggggccgggtcagtcctacatgtgagatgggttagggcaagtctttgccatcccccagatggctctgtcttcttgtgtatggcagggctgggactgctgtcccttgtacagttttctgtcactggtgggcactggacaggcatagcagactctcttgtggccacactaggttgtcgcctttcaggcagtgtcccgccacctttgcttcccgctccttctggacattccagagccctgcaccaaacccttacttggtgtctgcacctcctttccctctctccatcttccaatccctggaaaagtctggtctgagtgtgacttgggaagctttcagtgctgctgtttggcccagctcattactttctccctttctctaccacagcaaacacattctccaccatgtcagtctaaagagtctaaaggggccgggagaagcatgagcgaggggcagattctagtcgggagcccatgccctggaaatccatctttcttcatctttcccattgaccactttgggtttgacctgcacatctgcagtgagggcagaattcaacaagcacaactcactggtctttcagtcaacgtgctagaaaccgatgacttattaatctctaattttttggcgcctctttcattgaatgagaattgctttcgtatagttcacattagaaaaatgcctaatatactaaagtaaaccaaacgttgtcacttttctcttgttcttgaaacattgcaaccaaaaaggtcagcacaaaggccttcacctacgtgaagacctcctggtaggatctgtccatgggatggagaaccactctgtccagatctggggttgggtcatgacaccagctaccaattttagaatattatttcttggtttctttatgaaaaatgggtgctagtggtaattgctttgtggcttagtaaactactctgtggatgatttccaaacattcaaagccaatagccttgttattaacaagatattttgagtacaatatggctcattgacttttccattacatctgaggattccagagtcctctgttcatccctgggatagagtgagccctcttgcgtcttccagggtagctcaggttggcccagtttgggccagtccatttttggaggtcactctttcccccctcatcccctcacctccttctctttacccccttcacgtacttcctttctttcttccctctgttattcattcatcaagcaggttaaagccattgtgctaagatctaatctgaggacactataatggccctgtcgtcagggaagcccgtgatcgctcgttttcaggggtcttaccggtcagcaaccttggcattgatacataggcactctacagaatttaagttttcagaggtaagtctgttgttctgattaatctgcattcattcagcgaatgctcaagacaagccaggcatgctgagaagcggcgctctagttgtatgtaagatgggcattcctctgctctcctctattctccatgtcgactgagaagagtataataagaacattgtaccctctccacacttaaccctctgggattctttattataatataaaccaccgtcgtgaggcatttacctgttggatggaaggtagacagcaacaagattttaatcacctggtcaccagaccctcacggcccatatccaattcgaatttcagaaatttctctgtttgctttaaataactctttacaaataagggtcgggcacggtggctcacgcctgtaatcccagctctttgggaggccgaggtgggcagatcacgaggtcaggagatcgagaccatcctggctaacatggtgaaaccccgtctctgctaaaaatacaaaaaattagccagatgtggtggtgcacacctgtagtcccaactattcggcaggctgaggcagtagaatcgcttgaacctgggaggcggagattgcagtgaaccaagatcgggccactgcactccagcttgggtgacagagcaagactccatctcaaaaaaattataaataactctttgcaaataggaaagtgaagctcaagggtaaccagtgaggctatgaaattgccagtgaattaagaccagggctagagtcaacagtccagaacccctatccgtatgaacaggggcccgtttctggttgaaatcaaggttaggatgcaactgagaaaataaaagactgcactttggagaggcaagcacgctatccgggttgttgttttgttttatgtcttggtgcttaggtgaggacttagctgggtttattcaaagtgggcgggtctgggctattcttgagaatgtcccttccatttctgagaacaagtcagccccttctacctgcctccacccaggagactgatgcacaagatctgtttgtgaaagcctgatttaaaaagaaaaaaaaaattccttaagccaaatggtgttccaagttggttgctgtgacaacctccaggaagagccacttgttaccctctattctttctagtgctttcagtcagtggcaacacataggccccttggaccgtggggatggcggccctgagattctgtcagtgggaccaccctgggcctcctttctacctccactcagcaccctgttggccaaggagaatttctgcggtgggaggcagtgctctgctagtcaggattgataaacagctgggcacaccgaaacagtgtaccaacgaattcaccaaccaggggtttctttccctaccctttgtgaaaaccaatcaattactagatgagtggatggatgcagaaaaatctgggctgagccaaagtcccttttggaaatacaagccataacattcgaaggacatcagcgaccttggcttgtttaggtgattttacttccagctgcaggtagtcttgacaaggagtgtttaaacagaaggctcaagatgcattccttgtgtaggtcggagagagcacttctaatgttaagtggggtacagatcagctgcccccccacgtagcctggacatcgtcttatccccataatccttgccatccctacaaggcccatcgccaccaccttttcccaggtttattgaggtatgattgacatccagtaaaattcaccctttggaaatatacagctctgtgaattttgacaaatttagtgtcttgtgaccatcaccaagatcaacctgtttttaaccctccaaaaaattcccttctcctgccctctttccctggcaaccctgattgattatctgatcctataattttgccttttctagaatgtcatataaatggagtcacactgatgtcgccttttgagtctggcatctttccctcagcttaatgcttttgagtcattcatgatgtgtgcgtgtggtttgttccttctccttgccgggaagtatttcattgcatgggcgtactactctgcttctttatttttacactgagcctttcgccctggaagttcttggcccagggtcttcaacttgtttgcacgaccacttccagcttgctgcttccttcagttccccaggctcctcctccaaatgccagctgtgcccacaagctgttcttagggctcacactcgccttttggcgcgtggtgggtttttggtagtgcagaaagaatccagggatgggaggggaagggacggatgggtgctcaattgctgctcacgtctgctgcaacctgaagcttgcatctcagccagcagatctgctcccttctgggacccaggcttcagtgtcacacggtccttggctatgtattgggcgttggaggctttgaaaggcgagcagaagcagcatggacaagaaggctggggctggccctggggctcatcatgatgctttcctggatctgttgcttcatctgcaagctgagggtgtttgttctagatgagtgtctcaggccaccggcaactgcatgtacctcctccctttctcatttccaatgatgtaccctgtacacgtgttcatgctgtgtctggctctcatctgcacaatcgtgcatagaattgcctcaagtcctggtgagagagatgccgtggtacttttccatttagattcaaatggagctaaaattaagagttttatgagctgttaagaatgaggtagtttctcctaggaccccccaaagacagtgcaagtaatgaccgtttggatctcattcgtcgatctttgatagtatgttctggagtctactccccaggagccaggacaggcgtgaagatggagtccttgtcgcagctggagccttgcctagctggtgatcacacagcctggcctgtacctgcaccccactggatggtggtacatggtggcagggacaggaccacacccagttaaggccagaccaggctgagtgtgacccctgaggtaaacactccactaagctgtgtcttgttcatgccccctgctcagtgaaaggtgagtcccgagaccagttgggtacctctctatgcgaaccagagacatttctggatccaggccaggtgaagattagggccaggaagcctgagcccccggggcctcaaggtagggagccgaagaggctgccaggactctgctgggttgaaatttgccggggaggactcttgtctccccctcaggagtatttttgttgaggctttcctggaggtgaagaagcaattcccattgcagcaggttagagcgagaatcagacagagggcaaaaaccaattcgcttctccccacgttctaaatgctggggcatggctgtcaggagggcttcctgggaggtgtctctgggggtggggtgaggttggggcgatggcctttggagattgcgtgtggtgttcaggactgttccttggtgtttgagggaaactttagtgggattgcagtggaatgtaaggtcagggcacgtgggtgctctctcggggtggggtgactgggagacctagagggaaagcctgctatgcagggggagagcacaggactggccctgctctgcggcctcctttgtcccataacctgaagttaagtcacatcccctgtcgggacctccgtgcactcatctgtcaagtgggggcgcttcccttccagcatcacctgcagcagacgggctctcgggagtcgtgggttccaggcagctgtgtggacccagggacagacattcaaagggacgccagccatccttagtgacaggggccccaacttagcatcccttcccttccgttaggaaggagatgaccggaagcaaccccttcacagacacgagcacatcggcaaaccctatgaaagtggaattttctaacaaaataaacttgcttgtttgatctgttttctgtaacttttgctaaatactttatacatttttcatgttaaagagccgtgtctcccgccagcactcctcaccccggtatgaatgtgtttcctccacattgtatatccttccaccctctggctgcctagatcagtaaataaaattgatgtaatataatttataagtaacactgttgaaaccctgatcccagtggaggctgtaacccacctgcccccgcaccacccccctgacccctgttaccgcatttgtgtgtattaatgctgaagaattaaatgtttaaagagtttaaattttgaaggcgtttgctatatacagttgtcctgcattattataaagagttttcaggaagtt

SEQ ID NO: 18 - DNA, 8024 bp, Homo sapiens
atgcttttctttagagctcctattgcttctgggtttggggtgtgagaggatgcagagtgggagaccttaaaaccgtctgatctggctgctaaagcgagtgtctgacgaccacccattaacaccagcgagtagcgtttgctcacggctttaggataagaagcctggaatggtcccccctccgccgggagaagaaagccagacggtcatccttccacctggctggcagagctacctgtcgcctcagggccggcggtactatgtcaacacgaccaccaatgagaccacctgggaacgtcccagcagttctcctgggattccagccagccctggctctcacaggagctctctgcctccaacagtgaatggataccacgcatcagggaccccagcgcaccctccagagactgcccacatgagtgtccgaaaatccaccggtgattcccagaacctgggatcctcatcgccaagcaaaaagcagagcaaggaaaacaccatcacaataaactgtgtgacgttccctcacccagacacgatgccggaacagcagctgctgaaaccaaccgagtggagctactgcgactacttctgggctgataagaaggacccccaaggcaacggcaccgtggctgggtttgaactactgctccagaaacagctgaagggcaaacaaatgcagaaggaaatgtcagaattcatccgggaaaggataaagattgaagaagactatgcgaagaacttagctaagctctctcagaactccttggcttcacaggaggaaggctccttgggagaggcgtgggcccaggtgaagaagagcctggcggacgaagcagaagttcacctcaagttctctgccaagcttcacagcgaggtggagaagcccctgatgaacttccgtgagaacttcaagaaagacatgaagaagtgcgaccaccacattgccgaccttcgcaagcagctcgccagccgctatgcctcggtggagaaggcccggaaagccctcacagagcggcagagagacctggagatgaagacccagcagctggagatcaagctgagcaacaagacagaggaggacatcaagaaggcgcggagaaagtccacacaggctggagacgacctcatgcgctgtgtggatctctacaaccaggcccagtccaaatggtttgaagagatggtgaccaccacattggagctagagcggctggaggtggagagggtagagatgatccggcagcacctgtgccagtacacgcagctgcggcatgaaacagacatgttcaaccaaagcacagtcgagcccgtggatcagctgcttcgaaaagtggacccggccaaagacagggagctgtgggtcagagagcacaagacgggcaacatccgccctgtggacatggagatctagatgggcctgtgcagcttcggggggtcctgctggggaggggggctgggctcccaccatggggcccatgccgagtggatgccccccaccctctctcctgggccactgaggagaggggagagagctggtgattccagaagggtgacccggacagcctagctgggggctcccccatattcccaggcccagaagacagacccacagccctgcccttgtctctgaggctgaagaccccctgactcccatgctgtgcttgccgctctgaaacaaacagaggctggaactttgtggtccttgccgagttttgtaggggtcactgtcacatgcttgtgccctggaagccccaaggctcttcctccagctggctcccttgtctccagggctttggaggatcagggtagggagggctctgtctctaagccaggtgtcaggatcagaatcatgggtagaaggtgccattcagctcacagccgcacccagaatcctttgcagccctccttctttatttttttcccattgcattctgggagtccacatctggctttctcagccactgttcatcaccaggggttttaggaggaaggcttggctcctgtcttcccagacccaccatgcctggagaggtcaggatggaactacctcattcggcaaattagccccaaattgagcgctgaatcgtgtcccatgagatcaggcgccatctgtaaagtctcctctggaaatgccaatccatccttcccccagctgcttcctcggggaggcccctgcccccaccctgccagcccttcccagtctcattagaggaagctttccaaagttctcagttatcaagacctcatccagctcgtccaaaggcttcagggatggaaacaaaccagctcgtctcagaggccagcaagctggggcctgtccgccacggtgccctgtgcacctttgggctgccctggcccccactctcccgggccgcccaccacaggctcttaatggggccgggtcagtcctacatgtgagatgggttagggcaagtctttgccatcccccagatggctctgtcttcttgtgtatggcagggctgggactgctgtcccttgtacagttttctgtcactggtgggcactggacaggcatagcagactctcttgtggccacactaggttgtcgcctttcaggcagtgtcccgccacctttgcttcccgctccttctggacattccagagccctgcaccaaacccttacttggtgtctgcacctcctttccctctctccatcttccaatccctggaaaagtctggtctgagtgtgacttgggaagctttcagtgctgctgtttggcccagctcattactttctccctttctctaccacagcaaacacattctccaccatgtcagtctaaagagtctaaaggggccgggagaagcatgagcgaggggcagattctagtcgggagcccatgccctggaaatccatctttcttcatctttcccattgaccactttgggtttgacctgcacatctgcagtgagggcagaattcaacaagcacaactcactggtctttcagtcaacgtgctagaaaccgatgacttattaatctctaattttttggcgcctctttcattgaatgagaattgctttcgtatagttcacattagaaaaatgcctaatatactaaagtaaaccaaacgttgtcacttttctcttgttcttgaaacattgcaaccaaaaaggtcagcacaaaggccttcacctacgtgaagacctcctggtaggatctgtccatgggatggagaaccactctgtccagatctggggttgggtcatgacaccagctaccaattttagaatattatttcttggtttctttatgaaaaatgggtgctagtggtaattgctttgtggcttagtaaactactctgtggatgatttccaaacattcaaagccaatagccttgttattaacaagatattttgagtacaatatggctcattgacttttccattacatctgaggattccagagtcctctgttcatccctgggatagagtgagccctcttgcgtcttccagggtagctcaggttggcccagtttgggccagtccatttttggaggtcactctttcccccctcatcccctcacctccttctctttacccccttcacgtacttcctttctttcttccctctgttattcattcatcaagcaggttaaagccattgtgctaagatctaatctgaggacactataatggccctgtcgtcagggaagcccgtgatcgctcgttttcaggggtcttaccggtcagcaaccttggcattgatacataggcactctacagaatttaagttttcagaggtaagtctgttgttctgattaatctgcattcattcagcgaatgctcaagacaagccaggcatgctgagaagcggcgctctagttgtatgtaagatgggcattcctctgctctcctctattctccatgtcgactgagaagagtataataagaacattgtaccctctccacacttaaccctctgggattctttattataatataaaccaccgtcgtgaggcatttacctgttggatggaaggtagacagcaacaagattttaatcacctggtcaccagaccctcacggcccatatccaattcgaatttcagaaatttctctgtttgctttaaataactctttacaaataagggtcgggcacggtggctcacgcctgtaatcccagctctttgggaggccgaggtgggcagatcacgaggtcaggagatcgagaccatcctggctaacatggtgaaaccccgtctctgctaaaaatacaaaaaattagccagatgtggtggtgcacacctgtagtcccaactattcggcaggctgaggcagtagaatcgcttgaacctgggaggcggagattgcagtgaaccaagatcgggccactgcactccagcttgggtgacagagcaagactccatctcaaaaaaattataaataactctttgcaaataggaaagtgaagctcaagggtaaccagtgaggctatgaaattgccagtgaattaagaccagggctagagtcaacagtccagaacccctatccgtatgaacaggggcccgtttctggttgaaatcaaggttaggatgcaactgagaaaataaaagactgcactttggagaggcaagcacgctatccgggttgttgttttgttttatgtcttggtgcttaggtgaggacttagctgggtttattcaaagtgggcgggtctgggctattcttgagaatgtcccttccatttctgagaacaagtcagccccttctacctgcctccacccaggagactgatgcacaagatctgtttgtgaaagcctgatttaaaaagaaaaaaaaaattccttaagccaaatggtgttccaagttggttgctgtgacaacctccaggaagagccacttgttaccctctattctttctagtgctttcagtcagtggcaacacataggccccttggaccgtggggatggcggccctgagattctgtcagtgggaccaccctgggcctcctttctacctccactcagcaccctgttggccaaggagaatttctgcggtgggaggcagtgctctgctagtcaggattgataaacagctgggcacaccgaaacagtgtaccaacgaattcaccaaccaggggtttctttccctaccctttgtgaaaaccaatcaattactagatgagtggatggatgcagaaaaatctgggctgagccaaagtcccttttggaaatacaagccataacattcgaaggacatcagcgaccttggcttgtttaggtgattttacttccagctgcaggtagtcttgacaaggagtgtttaaacagaaggctcaagatgcattccttgtgtaggtcggagagagcacttctaatgttaagtggggtacagatcagctgcccccccacgtagcctggacatcgtcttatccccataatccttgccatccctacaaggcccatcgccaccaccttttcccaggtttattgaggtatgattgacatccagtaaaattcaccctttggaaatatacagctctgtgaattttgacaaatttagtgtcttgtgaccatcaccaagatcaacctgtttttaaccctccaaaaaattcccttctcctgccctctttccctggcaaccctgattgattatctgatcctataattttgccttttctagaatgtcatataaatggagtcacactgatgtcgccttttgagtctggcatctttccctcagcttaatgcttttgagtcattcatgatgtgtgcgtgtggtttgttccttctccttgccgggaagtatttcattgcatgggcgtactactctgcttctttatttttacactgagcctttcgccctggaagttcttggcccagggtcttcaacttgtttgcacgaccacttccagcttgctgcttccttcagttccccaggctcctcctccaaatgccagctgtgcccacaagctgttcttagggctcacactcgccttttggcgcgtggtgggtttttggtagtgcagaaagaatccagggatgggaggggaagggacggatgggtgctcaattgctgctcacgtctgctgcaacctgaagcttgcatctcagccagcagatctgctcccttctgggacccaggcttcagtgtcacacggtccttggctatgtattgggcgttggaggctttgaaaggcgagcagaagcagcatggacaagaaggctggggctggccctggggctcatcatgatgctttcctggatctgttgcttcatctgcaagctgagggtgtttgttctagatgagtgtctcaggccaccggcaactgcatgtacctcctccctttctcatttccaatgatgtaccctgtacacgtgttcatgctgtgtctggctctcatctgcacaatcgtgcatagaattgcctcaagtcctggtgagagagatgccgtggtacttttccatttagattcaaatggagctaaaattaagagttttatgagctgttaagaatgaggtagtttctcctaggaccccccaaagacagtgcaagtaatgaccgtttggatctcattcgtcgatctttgatagtatgttctggagtctactccccaggagccaggacaggcgtgaagatggagtccttgtcgcagctggagccttgcctagctggtgatcacacagcctggcctgtacctgcaccccactggatggtggtacatggtggcagggacaggaccacacccagttaaggccagaccaggctgagtgtgacccctgaggtaaacactccactaagctgtgtcttgttcatgccccctgctcagtgaaaggtgagtcccgagaccagttgggtacctctctatgcgaaccagagacatttctggatccaggccaggtgaagattagggccaggaagcctgagcccccggggcctcaaggtagggagccgaagaggctgccaggactctgctgggttgaaatttgccggggaggactcttgtctccccctcaggagtatttttgttgaggctttcctggaggtgaagaagcaattcccattgcagcaggttagagcgagaatcagacagagggcaaaaaccaattcgcttctccccacgttctaaatgctggggcatggctgtcaggagggcttcctgggaggtgtctctgggggtggggtgaggttggggcgatggcctttggagattgcgtgtggtgttcaggactgttccttggtgtttgagggaaactttagtgggattgcagtggaatgtaaggtcagggcacgtgggtgctctctcggggtggggtgactgggagacctagagggaaagcctgctatgcagggggagagcacaggactggccctgctctgcggcctcctttgtcccataacctgaagttaagtcacatcccctgtcgggacctccgtgcactcatctgtcaagtgggggcgcttcccttccagcatcacctgcagcagacgggctctcgggagtcgtgggttccaggcagctgtgtggacccagggacagacattcaaagggacgccagccatccttagtgacaggggccccaacttagcatcccttcccttccgttaggaaggagatgaccggaagcaaccccttcacagacacgagcacatcggcaaaccctatgaaagtggaattttctaacaaaataaacttgcttgtttgatctgttttctgtaacttttgctaaatactttatacatttttcatgttaaagagccgtgtctcccgccagcactcctcaccccggtatgaatgtgtttcctccacattgtatatccttccaccctctggctgcctagatcagtaaataaaattgatgtaatataatttataagtaacactgttgaaaccctgatcccagtggaggctgtaacccacctgcccccgcaccacccccctgacccctgttaccgcatttgtgtgtattaatgctgaagaattaaatgtttaaagagtttaaattttgaaggcgtttgctatatacagttgtcctgcattattataaagagttttcaggaagtt

SEQ ID NO: 19 - DNA, 7773 bp, Homo sapiens
cccgagagctgggcgtgggaacagcgtggggtcagggagacccctgcttgccctggcccagaatatggtgacttaggattcagactgagcatccctgattccccagcgcctccaccctcagggaacctgaatggggggaaaaaatgtccaatatggagaacagctttgacgatgtttcttgcctctctccccagaacctgggatcctcatcgccaagcaaaaagcagagcaaggaaaacaccatcacaataaactgtgtgacgttccctcacccagacacgatgccggaacagcagctgctgaaaccaaccgagtggagctactgcgactacttctgggctgataagaaggacccccaaggcaacggcaccgtggctgggtttgaactactgctccagaaacagctgaagggcaaacaaatgcagaaggaaatgtcagaattcatccgggaaaggataaagattgaagaagactatgcgaagaacttagctaagctctctcagaactccttggcttcacaggaggaaggctccttgggagaggcgtgggcccaggtgaagaagagcctggcggacgaagcagaagttcacctcaagttctctgccaagcttcacagcgaggtggagaagcccctgatgaacttccgtgagaacttcaagaaagacatgaagaagtgcgaccaccacattgccgaccttcgcaagcagctcgccagccgctatgcctcggtggagaaggcccggaaagccctcacagagcggcagagagacctggagatgaagacccagcagctggagatcaagctgagcaacaagacagaggaggacatcaagaaggcgcggagaaagtccacacaggctggagacgacctcatgcgctgtgtggatctctacaaccaggcccagtccaaatggtttgaagagatggtgaccaccacattggagctagagcggctggaggtggagagggtagagatgatccggcagcacctgtgccagtacacgcagctgcggcatgaaacagacatgttcaaccaaagcacagtcgagcccgtggatcagctgcttcgaaaagtggacccggccaaagacagggagctgtgggtcagagagcacaagacgggcaacatccgccctgtggacatggagatctagatgggcctgtgcagcttcggggggtcctgctggggaggggggctgggctcccaccatggggcccatgccgagtggatgccccccaccctctctcctgggccactgaggagaggggagagagctggtgattccagaagggtgacccggacagcctagctgggggctcccccatattcccaggcccagaagacagacccacagccctgcccttgtctctgaggctgaagaccccctgactcccatgctgtgcttgccgctctgaaacaaacagaggctggaactttgtggtccttgccgagttttgtaggggtcactgtcacatgcttgtgccctggaagccccaaggctcttcctccagctggctcccttgtctccagggctttggaggatcagggtagggagggctctgtctctaagccaggtgtcaggatcagaatcatgggtagaaggtgccattcagctcacagccgcacccagaatcctttgcagccctccttctttatttttttcccattgcattctgggagtccacatctggctttctcagccactgttcatcaccaggggttttaggaggaaggcttggctcctgtcttcccagacccaccatgcctggagaggtcaggatggaactacctcattcggcaaattagccccaaattgagcgctgaatcgtgtcccatgagatcaggcgccatctgtaaagtctcctctggaaatgccaatccatccttcccccagctgcttcctcggggaggcccctgcccccaccctgccagcccttcccagtctcattagaggaagctttccaaagttctcagttatcaagacctcatccagctcgtccaaaggcttcagggatggaaacaaaccagctcgtctcagaggccagcaagctggggcctgtccgccacggtgccctgtgcacctttgggctgccctggcccccactctcccgggccgcccaccacaggctcttaatggggccgggtcagtcctacatgtgagatgggttagggcaagtctttgccatcccccagatggctctgtcttcttgtgtatggcagggctgggactgctgtcccttgtacagttttctgtcactggtgggcactggacaggcatagcagactctcttgtggccacactaggttgtcgcctttcaggcagtgtcccgccacctttgcttcccgctccttctggacattccagagccctgcaccaaacccttacttggtgtctgcacctcctttccctctctccatcttccaatccctggaaaagtctggtctgagtgtgacttgggaagctttcagtgctgctgtttggcccagctcattactttctccctttctctaccacagcaaacacattctccaccatgtcagtctaaagagtctaaaggggccgggagaagcatgagcgaggggcagattctagtcgggagcccatgccctggaaatccatctttcttcatctttcccattgaccactttgggtttgacctgcacatctgcagtgagggcagaattcaacaagcacaactcactggtctttcagtcaacgtgctagaaaccgatgacttattaatctctaattttttggcgcctctttcattgaatgagaattgctttcgtatagttcacattagaaaaatgcctaatatactaaagtaaaccaaacgttgtcacttttctcttgttcttgaaacattgcaaccaaaaaggtcagcacaaaggccttcacctacgtgaagacctcctggtaggatctgtccatgggatggagaaccactctgtccagatctggggttgggtcatgacaccagctaccaattttagaatattatttcttggtttctttatgaaaaatgggtgctagtggtaattgctttgtggcttagtaaactactctgtggatgatttccaaacattcaaagccaatagccttgttattaacaagatattttgagtacaatatggctcattgacttttccattacatctgaggattccagagtcctctgttcatccctgggatagagtgagccctcttgcgtcttccagggtagctcaggttggcccagtttgggccagtccatttttggaggtcactctttcccccctcatcccctcacctccttctctttacccccttcacgtacttcctttctttcttccctctgttattcattcatcaagcaggttaaagccattgtgctaagatctaatctgaggacactataatggccctgtcgtcagggaagcccgtgatcgctcgttttcaggggtcttaccggtcagcaaccttggcattgatacataggcactctacagaatttaagttttcagaggtaagtctgttgttctgattaatctgcattcattcagcgaatgctcaagacaagccaggcatgctgagaagcggcgctctagttgtatgtaagatgggcattcctctgctctcctctattctccatgtcgactgagaagagtataataagaacattgtaccctctccacacttaaccctctgggattctttattataatataaaccaccgtcgtgaggcatttacctgttggatggaaggtagacagcaacaagattttaatcacctggtcaccagaccctcacggcccatatccaattcgaatttcagaaatttctctgtttgctttaaataactctttacaaataagggtcgggcacggtggctcacgcctgtaatcccagctctttgggaggccgaggtgggcagatcacgaggtcaggagatcgagaccatcctggctaacatggtgaaaccccgtctctgctaaaaatacaaaaaattagccagatgtggtggtgcacacctgtagtcccaactattcggcaggctgaggcagtagaatcgcttgaacctgggaggcggagattgcagtgaaccaagatcgggccactgcactccagcttgggtgacagagcaagactccatctcaaaaaaattataaataactctttgcaaataggaaagtgaagctcaagggtaaccagtgaggctatgaaattgccagtgaattaagaccagggctagagtcaacagtccagaacccctatccgtatgaacaggggcccgtttctggttgaaatcaaggttaggatgcaactgagaaaataaaagactgcactttggagaggcaagcacgctatccgggttgttgttttgttttatgtcttggtgcttaggtgaggacttagctgggtttattcaaagtgggcgggtctgggctattcttgagaatgtcccttccatttctgagaacaagtcagccccttctacctgcctccacccaggagactgatgcacaagatctgtttgtgaaagcctgatttaaaaagaaaaaaaaaattccttaagccaaatggtgttccaagttggttgctgtgacaacctccaggaagagccacttgttaccctctattctttctagtgctttcagtcagtggcaacacataggccccttggaccgtggggatggcggccctgagattctgtcagtgggaccaccctgggcctcctttctacctccactcagcaccctgttggccaaggagaatttctgcggtgggaggcagtgctctgctagtcaggattgataaacagctgggcacaccgaaacagtgtaccaacgaattcaccaaccaggggtttctttccctaccctttgtgaaaaccaatcaattactagatgagtggatggatgcagaaaaatctgggctgagccaaagtcccttttggaaatacaagccataacattcgaaggacatcagcgaccttggcttgtttaggtgattttacttccagctgcaggtagtcttgacaaggagtgtttaaacagaaggctcaagatgcattccttgtgtaggtcggagagagcacttctaatgttaagtggggtacagatcagctgcccccccacgtagcctggacatcgtcttatccccataatccttgccatccctacaaggcccatcgccaccaccttttcccaggtttattgaggtatgattgacatccagtaaaattcaccctttggaaatatacagctctgtgaattttgacaaatttagtgtcttgtgaccatcaccaagatcaacctgtttttaaccctccaaaaaattcccttctcctgccctctttccctggcaaccctgattgattatctgatcctataattttgccttttctagaatgtcatataaatggagtcacactgatgtcgccttttgagtctggcatctttccctcagcttaatgcttttgagtcattcatgatgtgtgcgtgtggtttgttccttctccttgccgggaagtatttcattgcatgggcgtactactctgcttctttatttttacactgagcctttcgccctggaagttcttggcccagggtcttcaacttgtttgcacgaccacttccagcttgctgcttccttcagttccccaggctcctcctccaaatgccagctgtgcccacaagctgttcttagggctcacactcgccttttggcgcgtggtgggtttttggtagtgcagaaagaatccagggatgggaggggaagggacggatgggtgctcaattgctgctcacgtctgctgcaacctgaagcttgcatctcagccagcagatctgctcccttctgggacccaggcttcagtgtcacacggtccttggctatgtattgggcgttggaggctttgaaaggcgagcagaagcagcatggacaagaaggctggggctggccctggggctcatcatgatgctttcctggatctgttgcttcatctgcaagctgagggtgtttgttctagatgagtgtctcaggccaccggcaactgcatgtacctcctccctttctcatttccaatgatgtaccctgtacacgtgttcatgctgtgtctggctctcatctgcacaatcgtgcatagaattgcctcaagtcctggtgagagagatgccgtggtacttttccatttagattcaaatggagctaaaattaagagttttatgagctgttaagaatgaggtagtttctcctaggaccccccaaagacagtgcaagtaatgaccgtttggatctcattcgtcgatctttgatagtatgttctggagtctactccccaggagccaggacaggcgtgaagatggagtccttgtcgcagctggagccttgcctagctggtgatcacacagcctggcctgtacctgcaccccactggatggtggtacatggtggcagggacaggaccacacccagttaaggccagaccaggctgagtgtgacccctgaggtaaacactccactaagctgtgtcttgttcatgccccctgctcagtgaaaggtgagtcccgagaccagttgggtacctctctatgcgaaccagagacatttctggatccaggccaggtgaagattagggccaggaagcctgagcccccggggcctcaaggtagggagccgaagaggctgccaggactctgctgggttgaaatttgccggggaggactcttgtctccccctcaggagtatttttgttgaggctttcctggaggtgaagaagcaattcccattgcagcaggttagagcgagaatcagacagagggcaaaaaccaattcgcttctccccacgttctaaatgctggggcatggctgtcaggagggcttcctgggaggtgtctctgggggtggggtgaggttggggcgatggcctttggagattgcgtgtggtgttcaggactgttccttggtgtttgagggaaactttagtgggattgcagtggaatgtaaggtcagggcacgtgggtgctctctcggggtggggtgactgggagacctagagggaaagcctgctatgcagggggagagcacaggactggccctgctctgcggcctcctttgtcccataacctgaagttaagtcacatcccctgtcgggacctccgtgcactcatctgtcaagtgggggcgcttcccttccagcatcacctgcagcagacgggctctcgggagtcgtgggttccaggcagctgtgtggacccagggacagacattcaaagggacgccagccatccttagtgacaggggccccaacttagcatcccttcccttccgttaggaaggagatgaccggaagcaaccccttcacagacacgagcacatcggcaaaccctatgaaagtggaattttctaacaaaataaacttgcttgtttgatctgttttctgtaacttttgctaaatactttatacatttttcatgttaaagagccgtgtctcccgccagcactcctcaccccggtatgaatgtgtttcctccacattgtatatccttccaccctctggctgcctagatcagtaaataaaattgatgtaatataatttataagtaacactgttgaaaccctgatcccagtggaggctgtaacccacctgcccccgcaccacccccctgacccctgttaccgcatttgtgtgtattaatgctgaagaattaaatgtttaaagagtttaaattttgaaggcgtttgctatatacagttgtcctgcattattataaagagttttcaggaagtt

SEQ ID NO: 20 - DNA, 2246 bp, Homo sapiens
aaagtccgggggagccggtcccgggcagccgctcagccccctgcccctcgccgcccgccgcctgcctgggccgggccgaggatgcggcgcagcgcctcggcggccaggcttgctcccctccggcacgcctgctaacttcccccgctacgtccccgttcgcccgccgggccgccccgtctccccgcgccctccgggtcgggtcctccaggagcgccaggcgctgccgccgtgtgccctccgccgctcgcccgcgcgcccgcgctccccgcctgcgcccagcgccccgcgcccgcgcccagtcctcgggcggtcatgctgcccctctgcctcgtggccgccctgctgctggccgccgggcccgggccgagcctgggcgacgaagccatccactgcccgccctgctccgaggagaagctggcgcgctgccgcccccccgtgggctgcgaggagctggtgcgagagccgggctgcggctgttgcgccacttgcgccctgggcttggggatgccctgcggggtgtacaccccccgttgcggctcgggcctgcgctgctacccgccccgaggggtggagaagcccctgcacacactgatgcacgggcaaggcgtgtgcatggagctggcggagatcgaggccatccaggaaagcctgcagccctctgacaaggacgagggtgaccaccccaacaacagcttcagcccctgtagcgcccatgaccgcaggtgcctgcagaagcacttcgccaaaattcgagaccggagcaccagtgggggcaagatgaaggtcaatggggcgccccgggaggatgcccggcctgtgccccagggctcctgccagagcgagctgcaccgggcgctggagcggctggccgcttcacagagccgcacccacgaggacctctacatcatccccatccccaactgcgaccgcaacggcaacttccaccccaagcagtgtcacccagctctggatgggcagcgtggcaagtgctggtgtgtggaccggaagacgggggtgaagcttccggggggcctggagccaaagggggagctggactgccaccagctggctgacagctttcgagagtgaggcctgccagcaggccagggactcagcgtcccctgctactcctgtgctctggaggctgcagagctgacccagagtggagtctgagtctgagtcctgtctctgcctgcggcccagaagtttccctcaaatgcgcgtgtgcacgtgtgcgtgtgcgtgcgtgtgtgtgtgtttgtgagcatgggtgtgcccttggggtaagccagagcctggggtgttctctttggtgttacacagcccaagaggactgagactggcacttagcccaagaggtctgagccctggtgtgtttccagatcgatcctggattcactcactcactcattccttcactcatccagccacctaaaaacatttactgaccatgtactacgtgccagctctagttttcagccttgggaggttttattctgacttcctctgattttggcatgtggagacactcctataaggagagttcaagcctgtgggagtagaaaaatctcattcccagagtcagaggagaagagacatgtaccttgaccatcgtccttcctctcaagctagccagagggtgggagcctaaggaagcgtggggtagcagatggagtaatggtcacgaggtccagacccactcccaaagctcagacttgccaggctccctttctcttcttccccaggtccttcctttaggtctggttgttgcaccatctgcttggttggctggcagctgagagccctgctgtgggagagcgaagggggtcaaaggaagacttgaagcacagagggctagggaggtggggtacatttctctgagcagtcagggtgggaagaaagaatgcaagagtggactgaatgtgcctaatggagaagacccacgtgctaggggatgaggggcttcctgggtcctgttccctaccccatttgtggtcacagccatgaagtcaccgggatgaacctatccttccagtggctcgctccctgtagctctgcctccctctccatatctccttcccctacacctccctccccacacctccctactcccctgggcatcttctggcttgactggatggaaggagacttaggaacctaccagttggccatgatgtcttttcttctttttcttttttttaacaaaacagaacaaaaccaaaaaatgtccagatgaaaaaaaaaaa

SEQ ID NO: 21 - DNA, 13029 bp, Homo sapiens
ggagccgcggggcttccatccttcctttgactgatttttaaattttaatttgtattttccccgccgccccgccccttttcctccgaccccgccctatcgctccccggcttccctgctctttcctttttcccggcttccttcctcgcgtttctttcccctgcgccctcggcttgcctctctccctcctccctcgctctctcccccttctctccccttcttcctcggtttcttccgtcctctctctccccctcctcctcccccgcctcctcctcctgcgctcccgccccctgccccctccccccgtgcctgcagacgcgcggatcgtccatgcgctcctcgcgggcagaatgctgggcagcagcgtcaagagcgtgcagcccgaggtggagctgagcagcggcggcggcgacgagggcgcggacgaaccgcggggcgccggcaggaaggcggcagcggcggacggcagaggcatgctgcccaagcgcgccaaggcgcccggcggcggcggcggcatggccaaggccagcgcggctgagctgaaggtcttcaagtccggcagcgtggacagccgtgtccccggcgggccgcccgcctccaacctgcgcaagcagaagtcactcaccaacctctcttttctcacggactccgagaaaaagctgcagctttatgagcccgaatggagcgacgatatggccaaggcgcccaaaggcttaggcaaggtggggtccaagggccgtgaagctccgctgatgtccaagacgctgtccaagtcggagcactcgctcttccaggccaagggcagcccggcgggcggcgccaagacccccctggctccgctcgcgcccaacctgggaaagccgagccggatccctcgaggaccctatgcggaggtcaagccgctcagcaaggcgcctgaagcggccgtgagcgaagatggcaaatcggacgacgagctgctctccagcaaggccaaggcgcaaaagagctctgggcctgtcccctctgccaagggccaggaggagcgcgccttcctcaaggtggaccccgagctggtggtgaccgtgctgggagacctggagcagctgctcttcagccagatgctggacccagagtcccagagaaagaggacagtgcagaatgtcctggatctccggcagaacctggaagagaccatgtccagcctgcgagggtcccaggtgactcacagctccctggagatgacctgctacgacagcgatgatgccaacccacgcagcgtgtccagcctctccaaccgctcgtcccctctgtcatggcgctatggccagtccagtccgcggctgcaggctggtgacgcgccctctgtgggtgggagctgccgctcggaggggacgcccgcctggtacatgcacggcgaacgggcccactactcccacaccatgcccatgcgcagccccagcaagctcagccatatctcccgcctggagctggtcgaatccctggactcggatgaggtggacctcaagtccggctacatgagcgacagtgacctcatgggcaagaccatgacggaggatgatgacatcactaccggctgggatgaaagcagctccatcagtagtggactcagcgatgcctcagacaatctcagttcagaagaattcaatgccagctcctcactcaactccctcccaagtactcccactgcttctcgcaggaactcaacaatagtgctacgcacagactcagagaagcgctcactggcagaaagtgggctgagctggtttagtgaatcagaggagaaagcccctaaaaaactggagtacgacagtggtagcctgaagatggaacctgggacttctaagtggcggagggagcggcctgagagctgtgatgattcatccaagggtggagaactgaaaaagcccatcagcctgggccaccctggttccctgaagaagggcaagaccccacctgtggctgtaacttcccccatcactcacacagcccagagtgccctcaaagtcgcaggcaaacctgagggcaaagctacagacaagggtaagcttgcagtgaagaatactgggctccaacgctcctcctctgatgctggtcgggaccgcctgagtgatgctaagaagcccccctcgggcattgctcgcccctccacttcgggatcctttggctacaagaagcctcctcctgccacaggcacagccactgtcatgcaaactggtggttcagccactctcagcaagatccagaagtcctcaggcatccctgtcaagccagtaaatgggcgcaagactagcttagatgtttccaacagtgcagagccaggattcctggctcctggagcccgttctaacatccagtaccgcagcctgccccggccagccaagtcaagttctatgagcgtgaccggcgggcggggtggacctcgccctgtgagcagcagcattgaccccagtctcctcagcaccaagcagggaggccttacgccttccagactgaaggagcctaccaaggtagccagtgggcggaccactccagcccctgtcaatcagacagatcgggaaaaggagaaggccaaagccaaggcagtggccttggactcagacaacatctccttgaagagtattggctccccagaaagtactcccaagaaccaagcaagccaccccacagccaccaagctggcagagctgccaccaacccctctcagggccacagcgaagagctttgtcaaaccaccctcactagccaatcttgacaaggtcaactccaacagtctggatctaccatcatccagtgataccacccatgcttcaaaggtcccagatctgcatgctacaagctcagcatctgggggccctctcccttcctgcttcacccccagtccggcacccatcctcaatattaactcagccagcttctcccagggcctggagctaatgagtggtttcagtgtgccaaaagagacccgcatgtaccccaaactctcaggcctgcacaggagcatggagtccctccagatgccaatgagcctccccagtgccttccccagcagtactcccgtccccaccccacctgctccccctgctgctcccacagaagaagagacggaagagctgacttggagtggaagccccagagctgggcaactggacagtaatcagcgggatcggaacactcttcccaagaaagggctcaggtaccagcttcagtcccaggaggagaccaaggagaggcgacattcccataccattggtgggctgcctgaatccgatgaccagtcagagctgccttctccccctgcacttcccatgtctctgagtgcaaagggccaacttaccaacatagtgagtcccactgcggccaccacgccaagaatcacccgctccaacagcatccccacccacgaggcggccttcgagctgtacagcggctcccaaatggggagcaccctgtccctggccgagagacccaagggaatgattcggtcaggatccttccgagaccccacggacgatgttcacggctcagtgctgtccctggcctccagtgcctcctccacctactcctcagctgaggagaggatgcaatctgagcaaatccggaagcttcgtagggaactggaatcatcccaggaaaaagtggccaccttgacgtctcagctttctgccaatgctaatctggtggctgcttttgagcagagcctggtgaatatgacatcccgcctgcgacacctggcagagacggccgaggagaaggacactgagctgctggatttgcgagaaaccatagactttctgaagaaaaagaactctgaggcccaggcagtcattcagggagcccttaatgcctcagaaaccacacccaaagaacttcggatcaagagacaaaactcctcagatagcatctcaagcctcaacagcatcactagccattccagcatcggcagcagcaaggatgctgatgcgaaaaagaagaaaaaaaagagttgggtctatgagcttcgaagttccttcaacaaagcgttcagtataaaaaaggggcccaagtcagcttcctcatactcggatatagaggagattgctacacccgactcttcagccccctcatcccccaaactacagcatggttctacagagactgcttcaccctccatcaagtcctccacctcgtcctccgtgggcactgatgtcaccgagggccctgctcacccagccccccacactaggctgttccatgcaaatgaggaggaggagccagagaagaaggaggtatcggagctgcgctctgagctatgggagaaggaaatgaagcttacagacatccgcttggaggccctcaactctgcccaccaactggatcagcttcgggagaccatgcacaacatgcagttggaggtggacctgctgaaagcagagaatgaccgactgaaggtagccccaggcccctcatcaggctccactccagggcaggtccctggatcatctgcattatcttccccacgccgctccctaggcctggcactcacccattccttcggccccagtcttgcagacacagacctgtcacccatggatggcatcagtacttgtggtccaaaggaggaagtgaccctccgggtggtggtgaggatgcccccgcagcacatcatcaaaggggacttgaagcagcaggaattcttcctgggctgtagcaaggtcagtggaaaagttgactggaagatgctggatgaagctgttttccaagtgttcaaggactatatttctaaaatggacccagcctctaccctgggactaagcactgagtccatccatggctacagcatcagccacgtgaaacgagtgttggatgcagagccccccgagatgcctccttgccgtcgaggtgtcaataacatatcagtctccctcaaaggtctgaaggagaaatgcgtcgacagcctggtgttcgagacgctgatccccaagccgatgatgcagcactacataagcctcctgctgaagcaccggcgcctcgtcctctcgggccccagcggcacgggcaagacctacctgaccaatcgcttggccgagtacctggtggagcgctctggccgtgaggtcacagagggcatcgtcagcaccttcaacatgcaccagcagtcttgcaaggatctgcaactgtatctttccaacctagccaaccagatagaccgggaaacaggaattggggatgtgcccctggtgattctattggatgacctgagtgaagcaggctccatcagtgagttggtcaatggggccctcacctgcaagtatcataaatgtccctatattataggtaccaccaatcagcctgtaaaaatgacacccaaccatggcttgcacttgagcttcaggatgttgaccttctccaacaacgtggagccagccaatggcttcctggttcgttacctgaggaggaagctggtagagtcagacagcgacatcaatgccaacaaggaagagctgcttcgggtgctcgactgggtacccaagctgtggtatcatctccacaccttccttgagaagcacagcacctcagacttcctcatcggcccttgcttctttctgtcgtgtcccattggcattgaggacttccggacctggttcattgacctgtggaacaactctatcattccctatctacaggaaggagccaaggatgggataaaggtccatggacagaaagctgcttgggaggacccagtggaatgggtccgggacacacttccctggccatcagcccaacaagaccaatcaaagctgtaccacctgcccccacccaccgtgggccctcacagcattgcctcacctcccgaggataggacagtcaaagacagcaccccaagttctctggactcagatcctctgatggccatgctgctgaaacttcaagaagctgccaactacattgagtctccagatcgagaaaccatcctggaccccaaccttcaggcaacactttaagggttcggcaatcactgtcacccccggacagcagaacgctggcatcagctatcttagctcctcctctcccctctcctctttcagagcactggctctccagccccaggaggagaacaggagggaggaggagatgaaagaggagggacaggttcttggtgctgtacctttgagaacttcctaggaaggaatggtggggtggcgtttgggaacttgtgccccctaaacacatttactggcctcctctaatgactttggggaaaagatgattctgggtctttcccttgacttcttgtttcaattacaaactcctgggctttctggggaggggttcagaaaacatcaaaacactgcagcagttcctaaatgattctcacaagcaaccctgagagagacagtcttgtgagggagatctgggggaggcaggaagctcctcagattttctcacagacccttcccaattccatcaccactgccaacaactcctcccccagagatctggctggagcccagaaaaagaagcatgtggtttaaaaaatgtttaaatcaatctgtaaaaggtaaaaatgaaaaacaaaaacaagcaaacaaacaaaaaacaatggaaaagatgaagctggagagagaggaaccagttgccaaggtagagagctgcccgctcctgccctctggatgacataggggacatcaacaagacggctgccaacctgagaagtcaccaaaccacaaaaataaccttacagccttcagggaaagactaccagctctgtctttctaccctctaatttaacaatgcataagagtcaataaaccctacttttttatttttggtttttattttgttttcatttttttctcccatttgcctatttatttttttgtttcccttttttttttctttttccgtttttccatttcctcacatgtccacgagatgcttgggttgcttttccaggggctagtttggcttttccaagtgggttttctttggagaatctgatgccatgcaattggcatgacacctgccatgccactatctttggcatccatggggcttatatgagacatgaagcattggctcagaagtagagggagaagaggaacccagttcccttgacttcccttttgagagcacacgttctgctgggtagctcaattgccagcctctgtcatgagaaggtatagccccatcttgatagaagagttactccgagctttatcatggaccagaggaaaaccagaaaactgaaaacattcctctgtcttgtggccagtttggcctttcactgcactattctgatggtgcctgactgaatccaaatatcctagctggctcttactatttttcacaaatgagtattcacatataagagatgaacatccatgtgagatcatcccaatcagaatataagactcaaggagtttgacttggtggccaatacctgccttccaaagagatcctacctttgcagatttgctcctttcccattgccttgaaggtctggcaatccctgttctttcatttgacaagtacttactgagtactcactatatacaaatcattaggttaaaacagacacacacacacacacacacacacacacacacacacacacacacacaagacctgggcccttaagtttacagtccagcaggaaatgttaacctccattcagctacgcccccttgttatctagaccttcgggatcatctaagaaatgtagctgaaacccaaggagccagctagaaagaagcttttgattagatgtacaatacattgggggcagaagatctgggatcaattaagatggagcctgaaggactatggaatcttgcttgtcaggaatgggcaagtctacttcctgccatttctgaaagccccgcgggaccagcttctaggctgagctgcctagtaggctgaagcttcaggactctgcaggtcaaggatatgtgatgagcaccggcctaagtgtttgctcttcagattcctaagtagcacaagactttatcagaatctataggcataccaacctggatcactcttccacccaaccgaggagtagatgcatctgaatcttcatatcggtatattaagtccaaaagatggtccgggctgcccctcacaaaagcttctgcatccacgtggtaagctcccatggatgacagggttctgtatgatggagactattattgctattgctgctaattccatgagctgtgaagatccctaaccaactcagctgtaacatatgcaattctgtggtgggaagaggctgtgtgtccaaggatggtgctgaaatcactgccttaaggtctctgctgtgcagaatgaggaggcccccgagctggctgttctaacttagaaggaagagaagactggatgggcctgcttgggatctaggcctcttctaaaccctatcctaagctccagttccatggcaaggctcagacttttaatgccatcttaatctgatggttgagcgcttcactctattttctggtgctgcccagccagtgccttctgccatggatgttactggctacttgagaaaaaggagaggggagaaccccttctttcattccaactgcctccgaccccaaagggattcttggctctctggtaaccatggataccaccatgaattttatttggatcctcagcaggttgattctggaggcctcatgctatgactttttatttctcttcctgggatccaccaccctctactctcagctgactgctgcatttaggccaggtctccaattgctttcctccagaaagtgtgttcccgtctagtgaggtagtattgaagcctcggctttccctctggagcctgggaccctgtttacagttgcacatctgggcccctcactgtggggattgatcattctcatgaaggaatcacagttatatggcaactgcagaaggctgagcctcctcatggtgctataaccccttgggacactcatccagacttctctgaagcagaaaacctgagctccccactcactgccctagaatttatggcaaggagcaaatctacagcattctctcccacctacgtcctgcttcttggttgagactactgggatccttcagaaaagaaacactgggtcccatagctaaattctcaaccgccaggcaccttcagaagaatccagcctaatactggaatttgtgctattatcttcctctccagccccccaactccatccctcaccacagttgtctaggaaatgacatgaattcaatatctaatgtcaaccaatggggagagccacaactccaggagaggttcctgagctgagtcccttaatttctggatgaagaagaccaacaagttttgtccaatgtatttgtttctcagaccttgcctaggcactaaaaataaaatactaggtcattggaggctaatgtgggacctgatgtctgcgtgtgtgtgtgtgtgtgtgtgtgtgtgtgtctccctctctcacacacacaagagcagtttgctgttgctgtttcctaccttctgaggcttcaaagtattttttaaaatctatgctttgtggcagctctacggtgcttatctctgtctttgtgtcaatccttaagtacccatgtctttttcatgtctaaccattgggaaggtagaggctggcagggaagacaaatctgctacaagtccatgggaagaccctacaatgaaatgttcattggttggtatactgttttagtcttgaattgccaactttccaactgatctatccatattccttaagtactaaagacaaaatagagggcttctttttctctcttaatgtcttgccttctggttttcctggtttgcaagactaagtgtacctaatctcaccatctcttcacttctagctctctgaaacaagggtcacactactcagagggataaccccttacagtggtctgaggagtaactatttcctaaagtattctaaaagagtaggaagagagaaatggtagcctgctgcttctcacagacacctcacatcctcacttgggatggcatccacatagaaaccctgcatttaggtaaaatttgcctgactgaaggggactcagtcctccaaatcaaggtcaagaagatatctgcatgagaccttaagaactctttattgccattatttggagagggcgggggaattgtcctaatcacacatttaacacagggaataagtgctgaagtgacccagatcaccaagcgcagttcctcatcatactttatttttgctttccttattccttggcactgactaagctaaagttaagaagccgacttcataagccaacccctgtgatgggatggaaaaatgggcttttgcagagggtttattaatagagatggatatactactcacaagttctggctcatggctccactgagaaggccatagtaataaaatgatcttatgaacactgttccccaaaggccaaagcctgaagatattgccccttataatccaatcagccttatattttaataagtcctgaatcaacctgactacggatatatggggccaccagggtgcatgggtgcatgtctgctcagcctagccctggaagtgagcactgccggccacagatcctgggaaaggtggtagtaacccagaagatgtagccttgaagggaggatacctatcaaaatgccaaagctgcagggacacgaagacggttgaaaattcaacctatgtatactagatccttccagtttgatggtttggtcattcttcttcatgattataccatggagaattttctgtgacaagggtggtcatggaagtaagtgagtgatcccctggtttctcattccttaaagcagtggttcgcaaagtatggcacaagaccagcagcatcagcagcctttgggaacttgttagaaacgaaaattctcaatcccatcccagatctgctgaatcagaaactctaatgagaggacccggcaatccacgttttaataagccctcctggtgattctgatgcacactaaattcaactgttttaaagggaaagccctttatagtattggagttcccacactgagaggctttggggcccaaaataagaaggttctaggttgtcattcagactttaacattaatttcaaagtcacctttctcatgcttccttgtgtttctgtttttccatttatgattttaacaaagaaaggtatgtgtgcttttgggtggaagttaggagaatgtttgtgtctttcctagttgaatacaaccttcagagaaaaaccttatgccttggaaattactacctggcacacaaaggggcttcaacaaggaaaagcagttggaggtctcttccagattgctcttctgccgaattatttgtatctattccgagctgattatgtaataggatggaaaaagtaaaaaaaaaaaaaaaaatctaatttgtatttccatgacaacgtgttctcccagcaacatccctctcctttatttgagttataaagggcactgctgggcctgagaaccaggccagaacctccttctgtatggcagctaacagtgtagggctccagtatcccaggaaggccccttatccacactccactcagctcataggagagtcttgcataatgaagacacagacctgggcacttcagtccttgtgctcctcctctcttttccccacagcaggacctggatacagaagtactcagccaaggtgacagaataaaatcctttttttgttgttttctgtttgtttgtttgttttggagaaggagtctcgctttgtcacccaggctggtgtgcagtggcacgatctcggctcactgcaacctccgcctcccaggttcaagcgattctcctgtctcagcctcctgagtagctgggattacagacgtgcgccatcacgcccagctaatttttgtatttttagtagatacggagttttgccttgttggccaggctgtgctggagctcctgacctcaggtgattcacctgccacagcctcccaaagtgctgggattacaggcgtgagccacagcaccctgccaaataagatcctttttaaaaaatatctgaaaaaagcttcatatctttacaaactcataaaatagctgattgggccatggaggagatgaggctgtttagaactggttttgtttcaagtttgtcaattttccctgtatgagaacttgggtaaagcacaaagaaacatacagtgctagtaacaggtctcctgcgccctggaactaagtgtttggaggaaggactaaaccccgggggaggtgagtataaaataattccactaagatcacctcctcagtccccagaaggctgatggtggatcctctggccatctcctgtggggtcttactgctcctctgccatttctctatgcctgaagacacgaagatgatatcaaggcagagctaccatatcgcagccagtctctaggctactgctgtgcagtggctcccactttctaatgcttttttgtttttgctttttctaacaaaacaatcttttttcaaaatgaattccaacccctgctagcttccttccccgcctccatactgttttaggcagcaccgtttatgtgacagagtccgtgtttctcaaatgcatggtgttcctcaggtggagagtgggcagaagtttttgcaacactttttttttaagttattgggtgcaaaatcccaaaccaggatatgtgtatgtctgtgtgtttatgttttttatttgaccctcccctctttcaacctacccccttttatatctaatgtagaaaaagcgaaattgaatctggaaagcaaactgttgtatatagttgcggtaacaatcatgaagagagagccgggctgtcccctcagtaattcattttaaataacaaattatttaaaaataaaattcatgccagagccagctgaagaggccttccttcatcaccactgaggccacccccaatctgggccctctgtccatctggcatgtctcctcccagcaagattcatctgttcaatgccatttgcgtttcaataaagttatctcctgtactgtccactgaaaaaa

SEQ ID NO: 22 - DNA, 11689 bp, Homo sapiens
agctggagccgtaagtacaagccctggtggtggggagaaaagggagcggagggcaggcgagggttaggtttccgaccctccgcgtggcccacagctcataccttttcgggtgtccccgggtgtcaggcgagagcggtcctggggggcgctgggtgcccacccggtgaatggccgcctgagccggggaagatgcttcatctgcccctgcccagatccggaagaacggtgaatttcccccgcagctgggatgaaagcagctccatcagtagtggactcagcgatgcctcagacaatctcagttcagaagaattcaatgccagctcctcactcaactccctcccaagtactcccactgcttctcgcaggaactcaacaatagtgctacgcacagactcagagaagcgctcactggcagaaagtgggctgagctggtttagtgaatcagaggagaaagcccctaaaaaactggagtacgacagtggtagcctgaagatggaacctgggacttctaagtggcggagggagcggcctgagagctgtgatgattcatccaagggtggagaactgaaaaagcccatcagcctgggccaccctggttccctgaagaagggcaagaccccacctgtggctgtaacttcccccatcactcacacagcccagagtgccctcaaagtcgcaggcaaacctgagggcaaagctacagacaagggtaagcttgcagtgaagaatactgggctccaacgctcctcctctgatgctggtcgggaccgcctgagtgatgctaagaagcccccctcgggcattgctcgcccctccacttcgggatcctttggctacaagaagcctcctcctgccacaggcacagccactgtcatgcaaactggtggttcagccactctcagcaagatccagaagtcctcaggcatccctgtcaagccagtaaatgggcgcaagactagcttagatgtttccaacagtgcagagccaggattcctggctcctggagcccgttctaacatccagtaccgcagcctgccccggccagccaagtcaagttctatgagcgtgaccggcgggcggggtggacctcgccctgtgagcagcagcattgaccccagtctcctcagcaccaagcagggaggccttacgccttccagactgaaggagcctaccaaggtagccagtgggcggaccactccagcccctgtcaatcagacagatcgggaaaaggagaaggccaaagccaaggcagtggccttggactcagacaacatctccttgaagagtattggctccccagaaagtactcccaagaaccaagcaagccaccccacagccaccaagctggcagagctgccaccaacccctctcagggccacagcgaagagctttgtcaaaccaccctcactagccaatcttgacaaggtcaactccaacagtctggatctaccatcatccagtgataccacccatgcttcaaaggtcccagatctgcatgctacaagctcagcatctgggggccctctcccttcctgcttcacccccagtccggcacccatcctcaatattaactcagccagcttctcccagggcctggagctaatgagtggtttcagtgtgccaaaagagacccgcatgtaccccaaactctcaggcctgcacaggagcatggagtccctccagatgccaatgagcctccccagtgccttccccagcagtactcccgtccccaccccacctgctccccctgctgctcccacagaagaagagacggaagagctgacttggagtggaagccccagagctgggcaactggacagtaatcagcgggatcggaacactcttcccaagaaagggctcaggtaccagcttcagtcccaggaggagaccaaggagaggcgacattcccataccattggtgggctgcctgaatccgatgaccagtcagagctgccttctccccctgcacttcccatgtctctgagtgcaaagggccaacttaccaacatagtgagtcccactgcggccaccacgccaagaatcacccgctccaacagcatccccacccacgaggcggccttcgagctgtacagcggctcccaaatggggagcaccctgtccctggccgagagacccaagggaatgattcggtcaggatccttccgagaccccacggacgatgttcacggctcagtgctgtccctggcctccagtgcctcctccacctactcctcagctgaggagaggatgcaatctgagcaaatccggaagcttcgtagggaactggaatcatcccaggaaaaagtggccaccttgacgtctcagctttctgccaatgctaatctggtggctgcttttgagcagagcctggtgaatatgacatcccgcctgcgacacctggcagagacggccgaggagaaggacactgagctgctggatttgcgagaaaccatagactttctgaagaaaaagaactctgaggcccaggcagtcattcagggagcccttaatgcctcagaaaccacacccaaagaacttcggatcaagagacaaaactcctcagatagcatctcaagcctcaacagcatcactagccattccagcatcggcagcagcaaggatgctgatgcgaaaaagaagaaaaaaaagagttggcttcgaagttccttcaacaaagcgttcagtataaaaaaggggcccaagtcagcttcctcatactcggatatagaggagattgctacacccgactcttcagccccctcatcccccaaactacagcatggttctacagagactgcttcaccctccatcaagtcctccacctcgtcctccgtgggcactgatgtcaccgagggccctgctcacccagccccccacactaggctgttccatgcaaatgaggaggaggagccagagaagaaggaggtatcggagctgcgctctgagctatgggagaaggaaatgaagcttacagacatccgcttggaggccctcaactctgcccaccaactggatcagcttcgggagaccatgcacaacatgcagttggaggtggacctgctgaaagcagagaatgaccgactgaaggtagccccaggcccctcatcaggctccactccagggcaggtccctggatcatctgcattatcttccccacgccgctccctaggcctggcactcacccattccttcggccccagtcttgcagacacagacctgtcacccatggatggcatcagtacttgtggtccaaaggaggaagtgaccctccgggtggtggtgaggatgcccccgcagcacatcatcaaaggggacttgaagcagcaggaattcttcctgggctgtagcaaggtcagtggaaaagttgactggaagatgctggatgaagctgttttccaagtgttcaaggactatatttctaaaatggacccagcctctaccctgggactaagcactgagtccatccatggctacagcatcagccacgtgaaacgagtgttggatgcagagccccccgagatgcctccttgccgtcgaggtgtcaataacatatcagtctccctcaaaggtctgaaggagaaatgcgtcgacagcctggtgttcgagacgctgatccccaagccgatgatgcagcactacataagcctcctgctgaagcaccggcgcctcgtcctctcgggccccagcggcacgggcaagacctacctgaccaatcgcttggccgagtacctggtggagcgctctggccgtgaggtcacagagggcatcgtcagcaccttcaacatgcaccagcagtcttgcaaggatctgcaactgtatctttccaacctagccaaccagatagaccgggaaacaggaattggggatgtgcccctggtgattctattggatgacctgagtgaagcaggctccatcagtgagttggtcaatggggccctcacctgcaagtatcataaatgtccctatattataggtaccaccaatcagcctgtaaaaatgacacccaaccatggcttgcacttgagcttcaggatgttgaccttctccaacaacgtggagccagccaatggcttcctggttcgttacctgaggaggaagctggtagagtcagacagcgacatcaatgccaacaaggaagagctgcttcgggtgctcgactgggtacccaagctgtggtatcatctccacaccttccttgagaagcacagcacctcagacttcctcatcggcccttgcttctttctgtcgtgtcccattggcattgaggacttccggacctggttcattgacctgtggaacaactctatcattccctatctacaggaaggagccaaggatgggataaaggtccatggacagaaagctgcttgggaggacccagtggaatgggtccgggacacacttccctggccatcagcccaacaagaccaatcaaagctgtaccacctgcccccacccaccgtgggccctcacagcattgcctcacctcccgaggataggacagtcaaagacagcaccccaagttctctggactcagatcctctgatggccatgctgctgaaacttcaagaagctgccaactacattgagtctccagatcgagaaaccatcctggaccccaaccttcaggcaacactttaagggttcggcaatcactgtcacccccggacagcagaacgctggcatcagctatcttagctcctcctctcccctctcctctttcagagcactggctctccagccccaggaggagaacaggagggaggaggagatgaaagaggagggacaggttcttggtgctgtacctttgagaacttcctaggaaggaatggtggggtggcgtttgggaacttgtgccccctaaacacatttactggcctcctctaatgactttggggaaaagatgattctgggtctttcccttgacttcttgtttcaattacaaactcctgggctttctggggaggggttcagaaaacatcaaaacactgcagcagttcctaaatgattctcacaagcaaccctgagagagacagtcttgtgagggagatctgggggaggcaggaagctcctcagattttctcacagacccttcccaattccatcaccactgccaacaactcctcccccagagatctggctggagcccagaaaaagaagcatgtggtttaaaaaatgtttaaatcaatctgtaaaaggtaaaaatgaaaaacaaaaacaagcaaacaaacaaaaaacaatggaaaagatgaagctggagagagaggaaccagttgccaaggtagagagctgcccgctcctgccctctggatgacataggggacatcaacaagacggctgccaacctgagaagtcaccaaaccacaaaaataaccttacagccttcagggaaagactaccagctctgtctttctaccctctaatttaacaatgcataagagtcaataaaccctacttttttatttttggtttttattttgttttcatttttttctcccatttgcctatttatttttttgtttcccttttttttttctttttccgtttttccatttcctcacatgtccacgagatgcttgggttgcttttccaggggctagtttggcttttccaagtgggttttctttggagaatctgatgccatgcaattggcatgacacctgccatgccactatctttggcatccatggggcttatatgagacatgaagcattggctcagaagtagagggagaagaggaacccagttcccttgacttcccttttgagagcacacgttctgctgggtagctcaattgccagcctctgtcatgagaaggtatagccccatcttgatagaagagttactccgagctttatcatggaccagaggaaaaccagaaaactgaaaacattcctctgtcttgtggccagtttggcctttcactgcactattctgatggtgcctgactgaatccaaatatcctagctggctcttactatttttcacaaatgagtattcacatataagagatgaacatccatgtgagatcatcccaatcagaatataagactcaaggagtttgacttggtggccaatacctgccttccaaagagatcctacctttgcagatttgctcctttcccattgccttgaaggtctggcaatccctgttctttcatttgacaagtacttactgagtactcactatatacaaatcattaggttaaaacagacacacacacacacacacacacacacacacacacacacacacacacaagacctgggcccttaagtttacagtccagcaggaaatgttaacctccattcagctacgcccccttgttatctagaccttcgggatcatctaagaaatgtagctgaaacccaaggagccagctagaaagaagcttttgattagatgtacaatacattgggggcagaagatctgggatcaattaagatggagcctgaaggactatggaatcttgcttgtcaggaatgggcaagtctacttcctgccatttctgaaagccccgcgggaccagcttctaggctgagctgcctagtaggctgaagcttcaggactctgcaggtcaaggatatgtgatgagcaccggcctaagtgtttgctcttcagattcctaagtagcacaagactttatcagaatctataggcataccaacctggatcactcttccacccaaccgaggagtagatgcatctgaatcttcatatcggtatattaagtccaaaagatggtccgggctgcccctcacaaaagcttctgcatccacgtggtaagctcccatggatgacagggttctgtatgatggagactattattgctattgctgctaattccatgagctgtgaagatccctaaccaactcagctgtaacatatgcaattctgtggtgggaagaggctgtgtgtccaaggatggtgctgaaatcactgccttaaggtctctgctgtgcagaatgaggaggcccccgagctggctgttctaacttagaaggaagagaagactggatgggcctgcttgggatctaggcctcttctaaaccctatcctaagctccagttccatggcaaggctcagacttttaatgccatcttaatctgatggttgagcgcttcactctattttctggtgctgcccagccagtgccttctgccatggatgttactggctacttgagaaaaaggagaggggagaaccccttctttcattccaactgcctccgaccccaaagggattcttggctctctggtaaccatggataccaccatgaattttatttggatcctcagcaggttgattctggaggcctcatgctatgactttttatttctcttcctgggatccaccaccctctactctcagctgactgctgcatttaggccaggtctccaattgctttcctccagaaagtgtgttcccgtctagtgaggtagtattgaagcctcggctttccctctggagcctgggaccctgtttacagttgcacatctgggcccctcactgtggggattgatcattctcatgaaggaatcacagttatatggcaactgcagaaggctgagcctcctcatggtgctataaccccttgggacactcatccagacttctctgaagcagaaaacctgagctccccactcactgccctagaatttatggcaaggagcaaatctacagcattctctcccacctacgtcctgcttcttggttgagactactgggatccttcagaaaagaaacactgggtcccatagctaaattctcaaccgccaggcaccttcagaagaatccagcctaatactggaatttgtgctattatcttcctctccagccccccaactccatccctcaccacagttgtctaggaaatgacatgaattcaatatctaatgtcaaccaatggggagagccacaactccaggagaggttcctgagctgagtcccttaatttctggatgaagaagaccaacaagttttgtccaatgtatttgtttctcagaccttgcctaggcactaaaaataaaatactaggtcattggaggctaatgtgggacctgatgtctgcgtgtgtgtgtgtgtgtgtgtgtgtgtgtgtctccctctctcacacacacaagagcagtttgctgttgctgtttcctaccttctgaggcttcaaagtattttttaaaatctatgctttgtggcagctctacggtgcttatctctgtctttgtgtcaatccttaagtacccatgtctttttcatgtctaaccattgggaaggtagaggctggcagggaagacaaatctgctacaagtccatgggaagaccctacaatgaaatgttcattggttggtatactgttttagtcttgaattgccaactttccaactgatctatccatattccttaagtactaaagacaaaatagagggcttctttttctctcttaatgtcttgccttctggttttcctggtttgcaagactaagtgtacctaatctcaccatctcttcacttctagctctctgaaacaagggtcacactactcagagggataaccccttacagtggtctgaggagtaactatttcctaaagtattctaaaagagtaggaagagagaaatggtagcctgctgcttctcacagacacctcacatcctcacttgggatggcatccacatagaaaccctgcatttaggtaaaatttgcctgactgaaggggactcagtcctccaaatcaaggtcaagaagatatctgcatgagaccttaagaactctttattgccattatttggagagggcgggggaattgtcctaatcacacatttaacacagggaataagtgctgaagtgacccagatcaccaagcgcagttcctcatcatactttatttttgctttccttattccttggcactgactaagctaaagttaagaagccgacttcataagccaacccctgtgatgggatggaaaaatgggcttttgcagagggtttattaatagagatggatatactactcacaagttctggctcatggctccactgagaaggccatagtaataaaatgatcttatgaacactgttccccaaaggccaaagcctgaagatattgccccttataatccaatcagccttatattttaataagtcctgaatcaacctgactacggatatatggggccaccagggtgcatgggtgcatgtctgctcagcctagccctggaagtgagcactgccggccacagatcctgggaaaggtggtagtaacccagaagatgtagccttgaagggaggatacctatcaaaatgccaaagctgcagggacacgaagacggttgaaaattcaacctatgtatactagatccttccagtttgatggtttggtcattcttcttcatgattataccatggagaattttctgtgacaagggtggtcatggaagtaagtgagtgatcccctggtttctcattccttaaagcagtggttcgcaaagtatggcacaagaccagcagcatcagcagcctttgggaacttgttagaaacgaaaattctcaatcccatcccagatctgctgaatcagaaactctaatgagaggacccggcaatccacgttttaataagccctcctggtgattctgatgcacactaaattcaactgttttaaagggaaagccctttatagtattggagttcccacactgagaggctttggggcccaaaataagaaggttctaggttgtcattcagactttaacattaatttcaaagtcacctttctcatgcttccttgtgtttctgtttttccatttatgattttaacaaagaaaggtatgtgtgcttttgggtggaagttaggagaatgtttgtgtctttcctagttgaatacaaccttcagagaaaaaccttatgccttggaaattactacctggcacacaaaggggcttcaacaaggaaaagcagttggaggtctcttccagattgctcttctgccgaattatttgtatctattccgagctgattatgtaataggatggaaaaagtaaaaaaaaaaaaaaaaatctaatttgtatttccatgacaacgtgttctcccagcaacatccctctcctttatttgagttataaagggcactgctgggcctgagaaccaggccagaacctccttctgtatggcagctaacagtgtagggctccagtatcccaggaaggccccttatccacactccactcagctcataggagagtcttgcataatgaagacacagacctgggcacttcagtccttgtgctcctcctctcttttccccacagcaggacctggatacagaagtactcagccaaggtgacagaataaaatcctttttttgttgttttctgtttgtttgtttgttttggagaaggagtctcgctttgtcacccaggctggtgtgcagtggcacgatctcggctcactgcaacctccgcctcccaggttcaagcgattctcctgtctcagcctcctgagtagctgggattacagacgtgcgccatcacgcccagctaatttttgtatttttagtagatacggagttttgccttgttggccaggctgtgctggagctcctgacctcaggtgattcacctgccacagcctcccaaagtgctgggattacaggcgtgagccacagcaccctgccaaataagatcctttttaaaaaatatctgaaaaaagcttcatatctttacaaactcataaaatagctgattgggccatggaggagatgaggctgtttagaactggttttgtttcaagtttgtcaattttccctgtatgagaacttgggtaaagcacaaagaaacatacagtgctagtaacaggtctcctgcgccctggaactaagtgtttggaggaaggactaaaccccgggggaggtgagtataaaataattccactaagatcacctcctcagtccccagaaggctgatggtggatcctctggccatctcctgtggggtcttactgctcctctgccatttctctatgcctgaagacacgaagatgatatcaaggcagagctaccatatcgcagccagtctctaggctactgctgtgcagtggctcccactttctaatgcttttttgtttttgctttttctaacaaaacaatcttttttcaaaatgaattccaacccctgctagcttccttccccgcctccatactgttttaggcagcaccgtttatgtgacagagtccgtgtttctcaaatgcatggtgttcctcaggtggagagtgggcagaagtttttgcaacactttttttttaagttattgggtgcaaaatcccaaaccaggatatgtgtatgtctgtgtgtttatgttttttatttgaccctcccctctttcaacctacccccttttatatctaatgtagaaaaagcgaaattgaatctggaaagcaaactgttgtatatagttgcggtaacaatcatgaagagagagccgggctgtcccctcagtaattcattttaaataacaaattatttaaaaataaaattcatgccagagccagctgaagaggccttccttcatcaccactgaggccacccccaatctgggccctctgtccatctggcatgtctcctcccagcaagattcatctgttcaatgccatttgcgtttcaataaagttatctcctgtactgtccactgaaaaaa

SEQ ID NO: 23 - DNA, 4602 bp, Homo sapiens
atgaagattcagaaaaagctgactggctgcagcaggctgatgcttctgtgtctttctctggagctgctgttggaagctggggctgggaatattcactactcagtgccggaagagacagacaaaggttccttcgtaggcaacatcgccaaggacctagggctgcaaccccaggagctggcagatggcggagtccgcatcgtctccagaggtaggatgccgcttttcgctctgaatcctagaagtggcagcttgatcaccgcgcgcaggatagaccgggaggagctctgcgctcagagcatgccgtgtctcgtgagttttaatatccttgttgaggataaaatgaagctttttcctgttgaagtagaaataattgatattaatgacaacactccccaattccagttagaggaactggagtttaaaatgaatgaaataacgactccaggtaccagagtctcattgccttttgggcaagaccttgatgtgggtatgaactcactccagagctaccaactcagctctaaccctcatttctccctggatgtgcaacagggagccgatgggcctcaacatccagagatggtgctgcagagtcccttagacagagaagaagaagctgtccaccacctcatcctcacagcttctgatgggggtgaaccagtccgttcagggaccctcagaatttacattcaggtggtggatgcaaatgacaatcctccagcatttactcaggcacaataccatataaatgtccccgaaaacgtgccgctgggtactcagctgctcatggtaaatgccactgaccctgatgagggagccaatggggaagtaacgtactcctttcacaatgtagaccacagagtggcccaaatatttcgtttagattcttacacaggagaaatatcaaataaagaaccactagatttcgaagaatacaaaatgtattcaatggaagttcaagcccaggatggtgcggggctcatggctaaagttaaggtactgatcaaagttttggatgtaaatgataatgccccagaagtgaccatcacctctgtcaccactgcagttccagaaaactttcctcctgggaccataattgctcttatcagtgtgcatgaccaggactcaggagacaatggctacaccacatgtttcattcctggaaatttaccctttaaattggaaaagttagttgataattattaccgtttagtgactgaaagaacactggacagagaacttatctctgggtacaacatcacaataacagcaatagaccaaggaactccagctctatctactgaaactcacatttcactactagtgacagatatcaatgacaactccccagtcttccatcaggactcctactctgcctacattcccgaaaacaaccccagaggagcctccatcttctctgtgagggcccacgacttggacagcaatgagaatgcacaaatcacttactccctaatagaggacactatccagggggcacccctatctgcctacctctccatcaactccgacactggggtcctgtatgcgctgcgatccttcgactatgagcagttccgggacatgcaactgaaagtgatggcgcgggacagtggggatccgcccctcagcagcaacgtgtctctcagcctattcctgctggaccagaacgacaacgcgcccgagatcctgtaccccgccctccccacagatggttctaccggcgtggagctggcgcccctctccgcagagcccggctacctggtgaccaaggtggtggcggtggacagagactcgggccagaacgcctggctgtcctaccgcctgctcaaggccagcgagccgggactcttctcggtgggtctgcacacgggcgaggtgcgcacggcgcgagccctgctggacagagacgcgctcaagcagagtctcgtggtggccgtccaggaccacggccagcccccgctctccgccactgtcacgctcaccgtggccgtggccgacaggatctccgacatcctggccgacctgggcagcctcgagccctccgccaaacccaacgattcggacctcactctgtacctggtggtggcggcggccgcggtctcctgcgtcttcctggccttcgtcatcgtgctgctggcgcacaggctgcggcgctggcacaagtcacgtctgctacaggcttcgggaggcggcttagcgagcatgcccggttcgcactttgtgggcgtggacggggttcgggctttcctgcagacctattcccacgaggtctccctcactgcggactcgcggaagagccacctgattttcccccagcccaactatgcggacacactcatcagccaggagagctgtgagaaaaagggttttctatcagcaccccagtctttacttgaagacaaaaaggaaccattttctcagcaagccccgcccaacacggactggcgtttctctcaggcccagagacccggcaccagcggctcccaaaatggcgatgacaccggcacctggcccaacaaccagtttgacacagagatgctgcaagccatgatcttggcgtccgccagtgaagctgctgatgggagctccaccctgggagggggtgccggcaccatgggattgagcgcccgctacggaccccagttcaccctgcagcacgtgcccgactaccgccagaatgtctacatcccaggcagcaatgccacactgaccaacgcagctggcaagcgggatggcaaggccccagcaggtggcaatggcaacaagaagaagtcgggcaagaaggagaagaagtaacatggaggccaggccaagagccacagggcggcctctccccaaccagcccagcttctccttacctgcacccaggcctcagagtttcagggctaacccccagaatactggtaggggccaaggccatgctccccttgggaaacagaaacaagtgcccagtcagcacctaccccttcccccccagggggttgaatatgcaaaagcagttccgctgggaacccccatccaatcaactgctgtacccatgggggtagtggggttactgtagacaccaagaaccatttgccacaccccgtttagttacagctgaactcctccatcttccaaatcaatcaggcccatccatcccatgcctccctcctccccaccccactccaacagttcctctttcccgagtaaggtggttggggtgttgaagtaccaagtaacctacaagcctcctagttctgaaaagttggaagggcatcatgacctcttggcctctcctttgattctcaatcttcccccaaagcatggtttggtgccagccccttcacctccttccagagcccaagatcaatgctcaagttttggaggacatgatcaccatccccatggtactgatgcttgctggatttagggagggcattttgctaccaagcctcttcccaacgccctggggaccagtcttctgttttgtttttcattgtttgacgtttccactgcatgccttgacttcccccacctcctcctcaaacaagagactccactgcatgttccaagacagtatggggtggtaagataaggaagggaagtgtgtggatgtggatggtgggggcatggacaaagcttgacacatcaagttatcaaggccttggaggaggctctgtatgtcctcaggggactgacaacatcctccagattccagccataaaccaataactaggctggacccttcccactacataatagggctcagcccaggcagccagctttgggctgagctaacaggaccaatggattaaactggcatttcagtccaaggaagctcgaagcaggtttaggaccaggtccccttgagaggtcagaggggcctctgtgggtgctgggtactccagaggtgccactggtggaagggtcagcggagccccagcaggaagggtgggccagccaggccattcttagtccctgggttggggaggcagggagctagggcagggaccaaatgaacagaaagtctcagcccaggatggggcttcttcaacagggcccctgccctcctgaagcctcagtccttcaccttgccaggtgccgtttctcttccgtgaaggccactgcccaggtccccagtgcgccccctagtggccatagcctggttaaagttccccagtgcctccttgtgcatagaccttcttctcccacccccttctgcccctgggtccccggccatccagcggggctgccagagaaccccagacctgcccttacagtagtgtagcgccccctccctctttcggctggtgtagaatagccagtagtgtagtgcggtgtgcttttacgtgatggcgggtgggcagcgggcggcgggctccgcgcagccgtctgtccttgatctgcccgcggcggcccgtgttgtgttttgtgctgtgtccacgcgctaaggcgaccccctcccccgtactgacttctcctataagcgcttctcttcgcatagtcacgtagctcccaccccaccctcttcctgtgtctcacgcaagttttatactctaatatttatatggctttttttcttcgacaaaaaaataataaaacgtttcttctgaaaagctg

SEQ ID NO: 24 - DNA, 4790 bp, Homo sapiens
aagggggtggaggtttggccctaaagcttcaggacaccaaagaaattcagtcgaacagcccaccagttctctccatagggacctgggtcccgtgaatgctggttatctcacaccctgaggaataaagattggaatccgcactggatgctggaagttgactcggagaaaattgcgacaggagggaaatggcggctctgcaaaagttgccacactgcagaaagctggtcctgctgtgcttccttttggcgaccctgtgggaggccagggccgggcagattcgctattctgtgcgggaagagatcgacagaggctccttcgtaggcaacatcgccaaggacttgggtttggagcccctggcactggcagagcagggagtccgcatcgtctccagaggtaggtcccagctctttgctctgaacccgcgaagcggcagcttggtcactgcgaacaggatagaccgggaggagctctgcgctcagagcgcaccctgtctgttgaattttaacattctgctggaggataaattgactatttattcagtagaggtggaaataacagatattaacgataatgcccctcgctttggagtagaggaactggagctaaaaatcagtgaaaccactacgccaggattccggattcctcttaagaatgcgcatgatgcagacgtaggtgagaacgcccttcagaagtacgcactcaacccaaatgaccacttctccctggacgtgcgaaggggagctgatgggaacaagtacccagaactggtgctggagcgctctctggaccgcgaggaagaggctgttcaccacctcgttctcgtggcttctgatgggggtgacccagtgctatctggcacctcccgcatctgcgtgaaggtcctggatgcgaacgacaatgcgcctgtttttacacagcccgagtaccgcataagcattccggagaatacgctcgtgggcacccggatactcacggtgaccgccactgacgcagatgagggctactacgctcaagtggtatattttctagagaaaagccctggagaaacctcagaggtatttgagcttaagtcaacatctggagaactgacaatcataaaagatctagattatgaggatgctacattccatgaaattgatattgaagctcaggatggtccgggccttctaaccagagcgaaggttatcgtcacggttctggatgtgaatgacaatgccccagaattttacatgacatctgctactagctcagtttctgaagactctcttccaggaaccataattgggctttttaatgtacatgatagagactctgggcagaacgcattcaccacctgttcactccccgaggatcttccttttaagttagaaaagtcagtagacaattactaccgactggttacaaccagagcccttgacagggaacagttttccttttacaacatcactctaaccgctaaagatggagggaacccctccctgtccacggatgctcacattttgctccaggtggcagacatcaacgacaacgcacccgccttctcccgcacatcctactccacctacattcccgaaaacaaccccagaggagcctctgtcttctcagtgacggcccatgaccccgacagcaacgacaatgctcatgtaacttactctttcgcggaggacactgttcagggggcacccttatcctcttacatctctatcaactccgacactggagtactctatgcactgcgctcctttgattatgagcagttgcgagacttgcaagtgtgggtgatagcgcgggacagcgggaaccctccactcagtagcaatgtatcattaagcctgttcgtgctggaccagaacgacaacgcgcccgagatcctgtaccctgccttccccacagacggttccactggcgtggagctggcgccccgctccgcagagcccggctacctggtgaccaaggtggtggcggtggacagagactcgggccagaacgcctggctgtcttaccacctgctcaaggccagcgagccgggactcttctcggtgggtctgcacacgggcgaggtgcgcacggcgcgagccctgctggacagagacgcgctcaagcagagcctcgtggtggccatccaggaccacggccagccccctctctccgccactgtcacgctcaccgtggccgtggccgacaggatccccgacatcctggccgacctgggcagcctcgagccctccgccatacccaacgattcggacctcactctgtacctggtggtggcggtggccgcggtctcctgcgtcttcctggccttcgtcatcgtgttgctggcgcacaggctgcggcgctggcacaagtcacgcctgctgcaggcttcaggaggcagcttgacaggcatgcagagctcgcactttgtgggcgtggacggggttcgggctttcctgcagacctattcccacgaggtctccctcactgcggactcgcggaagagccacctgattttcccccagcccaactatgcggacacgctcatcagccaggagagctgtgagaaaaaggattttttatcagcgcctcaatctctactcgaagaagaaagagaagaaacgttttctcagcaagccccgcccaacacggactggcgtttctctcaggcccagagacccggcaccagcggctcccaaaatggcgatgacaccggcacctggcccaacaaccagtttgacacagagatgctgcaagccatgatcttggcgtccgccagtgaagctgctgatgggagctccaccctgggagggggtgccggcaccatgggattgagcgcccgctacggaccccagttcaccctgcagcacgtgcccgactaccgccagaatgtctacatcccaggcagcaatgccacactgaccaacgcagctggcaagcgggatggcaaggccccagcaggtggcaatggcaacaagaagaagtcgggcaagaaggagaagaagtaacatggaggccaggccaagagccacagggcggcctctccccaaccagcccagcttctccttacctgcacccaggcctcagagtttcagggctaacccccagaatactggtaggggccaaggccatgctccccttgggaaacagaaacaagtgcccagtcagcacctaccccttcccccccagggggttgaatatgcaaaagcagttccgctgggaacccccatccaatcaactgctgtacccatgggggtagtggggttactgtagacaccaagaaccatttgccacaccccgtttagttacagctgaactcctccatcttccaaatcaatcaggcccatccatcccatgcctccctcctccccaccccactccaacagttcctctttcccgagtaaggtggttggggtgttgaagtaccaagtaacctacaagcctcctagttctgaaaagttggaagggcatcatgacctcttggcctctcctttgattctcaatcttcccccaaagcatggtttggtgccagccccttcacctccttccagagcccaagatcaatgctcaagttttggaggacatgatcaccatccccatggtactgatgcttgctggatttagggagggcattttgctaccaagcctcttcccaacgccctggggaccagtcttctgttttgtttttcattgtttgacgtttccactgcatgccttgacttcccccacctcctcctcaaacaagagactccactgcatgttccaagacagtatggggtggtaagataaggaagggaagtgtgtggatgtggatggtgggggcatggacaaagcttgacacatcaagttatcaaggccttggaggaggctctgtatgtcctcaggggactgacaacatcctccagattccagccataaaccaataactaggctggacccttcccactacataatagggctcagcccaggcagccagctttgggctgagctaacaggaccaatggattaaactggcatttcagtccaaggaagctcgaagcaggtttaggaccaggtccccttgagaggtcagaggggcctctgtgggtgctgggtactccagaggtgccactggtggaagggtcagcggagccccagcaggaagggtgggccagccaggccattcttagtccctgggttggggaggcagggagctagggcagggaccaaatgaacagaaagtctcagcccaggatggggcttcttcaacagggcccctgccctcctgaagcctcagtccttcaccttgccaggtgccgtttctcttccgtgaaggccactgcccaggtccccagtgcgccccctagtggccatagcctggttaaagttccccagtgcctccttgtgcatagaccttcttctcccacccccttctgcccctgggtccccggccatccagcggggctgccagagaaccccagacctgcccttacagtagtgtagcgccccctccctctttcggctggtgtagaatagccagtagtgtagtgcggtgtgcttttacgtgatggcgggtgggcagcgggcggcgggctccgcgcagccgtctgtccttgatctgcccgcggcggcccgtgttgtgttttgtgctgtgtccacgcgctaaggcgaccccctcccccgtactgacttctcctataagcgcttctcttcgcatagtcacgtagctcccaccccaccctcttcctgtgtctcacgcaagttttatactctaatatttatatggctttttttcttcgacaaaaaaataataaaacgtttcttctgaaaagctg

SEQ ID NO: 25 - DNA, 4590 bp, Homo sapiens
atgcagagagccagagaagccgaaatgatgaaaagtcaggtactgtttcccttcctgctgtctttgttctgcggggccatctcccagcagatccgatacacgattccagaggagctagccaacggctcacgggtggggaaacttgccaaggatctggggctcagtgtccgggagttgccaactcgaaaactgcgggttagtgcagaggattatttcaacgttagtttggagagcggggatttgttagtgaacggtaggatagatcgagagaagatttgcggaaggaaacttgagtgtgcactagaattcgaaacggtcgctgaaaacccaatgaatgttttccacgtggttgttgtaatccaagatattaatgacaatgcaccacgtttcgttgcaaaaggcattgacttagaaatttgtgagtcagccttacccggggtaaaattctctctggattctgctcaagatgcagatgtggaaggcaattcactgaagttatacaccatcaaccccaatcaatacttctctctgtcaacgaaggaaagtcctgatggaagtaaatatccggtattactgctggaaaaacctctagacagggaacatcagagctctcatcgcttaatcctgactgccatggatggcggggacccgcctctaagcggcaccacccatatctggatccgagttacggatgccaatgataatgctcccgtgtttagccaggaggtatacagggttagcctccaagaaaacgtaccgtggggaacctccgtgctgcgggtgatggccacagaccaggatgagggcattaatgcagagatcacctatgccttcctcaattccccaataagtaccagcctcttcaatctcaatccaaatactggcgacatcacaaccaatggcacattggattttgaagagacaagtagatatgtgttgagtgtggaagctaaggatggaggagtacacacagctcactgtaatgttcaaatagaaattgttgacgagaatgacaatgccccagaggtgacattcatgtccttctctaaccagattccagaggattcagaccttggaactgtaatagccctcataaaagtgcgagacaaggattctgggcaaaatggcatggtgacatgctatactcaggaagaagttcctttcaaattagaatccacctcgaagaattattacaagctggtgattgctggagccctaaaccgggagcagacagcagactacaacgtcacaatcatagccaccgacaagggcaaaccagccctttcctccaggacaagcatcaccctgcacatctccgacatcaacgacaatgcacctgttttccatcaggcctcctatgtggtccacgtgtctgagaacaacccacctggcgcctccattgcacaagtaagcgcctccgacccggatttgggacccaacggcagagtctcctactctattctggccagtgacctggagccgcgggagctgttgtcctacgtgtccgtgagcccgcagagcggggtggtgttcgcgcagcgcgccttcgaccacgagcagctgcgcgccttcgagctcacactgcaggccagggaccagggctcccccgcgctcagcgccaacgtgagcctgcgcgtgttggtgggcgacctcaatgacaatgcgccacgggtgctgtaccccgcgctggggcctgatggctccgccctcttcgatatggtgccacgcgccgcagagcccggctacctggtgaccaaggtggtggcggtggacgcagactcaggacacaacgcttggctgtcctaccacgtgctgcaggccagcgagcccgggctcttcagcctggggttgcgcacgggtgaggtgcgcacagcgcgtgccttgggcgacagggacgcggcccgccagcgcctgctggtcgctgtgcgtgatggaggacagccgccactctccgccaccgccacgctgcacctaatcttcgcggatagcctgcaagaggtattgccagacctcagcgaccgccctgagccctctgacccccagacggaactgcagttttacctggttgtggccttggccttgatctcagtgctctttctcctcgcggtgattctagcgatcgccctgcgcctgcgacgttcctccagcctcgacactgagggctgctttcaaaccggtctctgctccaagtctgggcccggggttcctcccaaccacagcgaggggactttgccctattcctacaatctatgtattgcctctcattctgcaaagacagagtttaattctctcaacctgacaccggaaatggctccccctcaggatctgctgtgtgatgatccttctatggttgtatgtgccagtaatgaagatcacaaaatcgcttatgacccttctttgtcttcgcaccaagccccgcccaacacggactggcgtttctctcaggcccagagacccggcaccagcggctcccaaaatggcgatgacaccggcacctggcccaacaaccagtttgacacagagatgctgcaagccatgatcttggcgtccgccagtgaagctgctgatgggagctccaccctgggagggggtgccggcaccatgggattgagcgcccgctacggaccccagttcaccctgcagcacgtgcccgactaccgccagaatgtctacatcccaggcagcaatgccacactgaccaacgcagctggcaagcgggatggcaaggccccagcaggtggcaatggcaacaagaagaagtcgggcaagaaggagaagaagtaacatggaggccaggccaagagccacagggcggcctctccccaaccagcccagcttctccttacctgcacccaggcctcagagtttcagggctaacccccagaatactggtaggggccaaggccatgctccccttgggaaacagaaacaagtgcccagtcagcacctaccccttcccccccagggggttgaatatgcaaaagcagttccgctgggaacccccatccaatcaactgctgtacccatgggggtagtggggttactgtagacaccaagaaccatttgccacaccccgtttagttacagctgaactcctccatcttccaaatcaatcaggcccatccatcccatgcctccctcctccccaccccactccaacagttcctctttcccgagtaaggtggttggggtgttgaagtaccaagtaacctacaagcctcctagttctgaaaagttggaagggcatcatgacctcttggcctctcctttgattctcaatcttcccccaaagcatggtttggtgccagccccttcacctccttccagagcccaagatcaatgctcaagttttggaggacatgatcaccatccccatggtactgatgcttgctggatttagggagggcattttgctaccaagcctcttcccaacgccctggggaccagtcttctgttttgtttttcattgtttgacgtttccactgcatgccttgacttcccccacctcctcctcaaacaagagactccactgcatgttccaagacagtatggggtggtaagataaggaagggaagtgtgtggatgtggatggtgggggcatggacaaagcttgacacatcaagttatcaaggccttggaggaggctctgtatgtcctcaggggactgacaacatcctccagattccagccataaaccaataactaggctggacccttcccactacataatagggctcagcccaggcagccagctttgggctgagctaacaggaccaatggattaaactggcatttcagtccaaggaagctcgaagcaggtttaggaccaggtccccttgagaggtcagaggggcctctgtgggtgctgggtactccagaggtgccactggtggaagggtcagcggagccccagcaggaagggtgggccagccaggccattcttagtccctgggttggggaggcagggagctagggcagggaccaaatgaacagaaagtctcagcccaggatggggcttcttcaacagggcccctgccctcctgaagcctcagtccttcaccttgccaggtgccgtttctcttccgtgaaggccactgcccaggtccccagtgcgccccctagtggccatagcctggttaaagttccccagtgcctccttgtgcatagaccttcttctcccacccccttctgcccctgggtccccggccatccagcggggctgccagagaaccccagacctgcccttacagtagtgtagcgccccctccctctttcggctggtgtagaatagccagtagtgtagtgcggtgtgcttttacgtgatggcgggtgggcagcgggcggcgggctccgcgcagccgtctgtccttgatctgcccgcggcggcccgtgttgtgttttgtgctgtgtccacgcgctaaggcgaccccctcccccgtactgacttctcctataagcgcttctcttcgcatagtcacgtagctcccaccccaccctcttcctgtgtctcacgcaagttttatactctaatatttatatggctttttttcttcgacaaaaaaataataaaacgtttcttctgaaaagctg

SEQ ID NO: 26 - DNA, 4602 bp, Homo sapiens
atggcggcgcctcctgctcgcccagaccacacccggctgctccagatctgccttctcctgggggttctggtggaaatcagggccgaacagattctctactcggtgtttgaggagcaggaagaaggctcagtggtgggcaacatcgccaaggacctggggttggcgccccgggagctggcggagcgcggagtccgcatcgtctccagaggtaggacgcagcttttcgccctgaacccgcgcagcggcaccttggtcaccgcgggtaggatagacagggaggagctctgcgacagatctccaaactgtgtgacaaacctggagattcttctagaagatacagtgaagattttgcgggtagaggtggaaataatcgatgttaatgataacccacccagttttgggacagaacagagggaaataaaagttgctgaaaatgaaaatcctggggcaagatttcctcttcctgaagcttttgatccggatgtaggtgtaaactccctgcagggttaccagctcaactcaaacggttacttttccctggacgtgcaaagtggggccgatgggattaagtacccagagctggtgctggaacgcgctctagatcgcgaggaagaggcggttcaccacctcgttctcacggccttcgatggaggtgacccggttcgctctggcactgccaggattctcataatacttgtggataccaacgataatgctcccgtgttcactcagcccgagtaccacgtaagtgttcgtgagaacgttcctgtaggcactcggctactcaccgtaaaagccactgatccagatgaaggagccaatggagacgtgacgtattctttccggaaagtaagagacaaaatatcacagctatttcagttgaattctctgagtggggatataacaatattggggggtctagattatgaggactctggattctatgacatagatgtagaagcccatgatgggcctggtctccgagctagaagcaaggtactggtgacagttctggatgaaaatgacaacgcaccagaagtcacagttacatctctcaccagctcagtccaggaatcttcttccccgggtacagtaattgcacttttcaacgtgcatgacagtgactcaggaggaaatggcctagtcacatgttctattccagataatctgccattcacacttgaaaagacctatggaaattattatcggttgttgacacacagaacactggacagggaagaagtctcagaatataacatcactgtaactgccactgaccagggaactcctccactgtctacagaaactcatatttcactgcaagtgatggacatcaatgacaacccacccactttccctcatgcttcctactctgcttacattcctgaaaacaaccccagaggagcctccatcttatctatgactgctcaagaccctgacagtggtgacaatgcccgaatcacttactccctggccgaagacaccttccagggtgcacctctgtcctcctatgtctccatcaactccaatacagggatcctatatgctctttgctccttcgactatgagcagtttagagacctgcagctgctgatgacagccagtgacagtggagaccctccactcagcagcaatgtgtcactgagcctctttgtgctggaccagaacgacaatgtccctgagatcctgtaccccaccttccctactgatggctccactggtgtggagctggcaccccgctccgcagattccggctacctggtgaccaaagtggtggcagtggacagagactcaggtcagaatgcctggctgtcctacagcctactcaagtccagcgagccgggactatttgcagtggggctgcacacaggcgaggtgcgcaccgcacgggccctgctggacagagacgcgctcaagcagaggcttgtagtggtcgtccaggaccatggccagccccctctctcggccaccgtcacactcactgtggctgtggccgacagcatcccagatgtcctggctgacttgggcagcctcaagccttcagcagacccagacgactcgggcctcacactctatctcgtggtggcagtggccgctgtctcctgcgtcttcctggcttttgtcacggtgctgctagcactcaagctgagacgctggcacaagtcacgcctgcttcacgctgaaggcagcaggttggcaggtgtgcctgcctcgcactttgtgggcgtggacggggttcgggctttcctgcagacctattcccacgaggtctccctcaccgcggactcgcggaagagtcacctgatcttctcccaacccagctatgcagacacgctcatcagccgggagagttgtgagaaaagcgagcctcttctgataactcaggatttacttgaaacaaaaggagaccctaatcttcagcaagccccgcccaacacggactggcgtttctctcaggcccagagacccggcaccagcggctcccaaaatggcgatgacaccggcacctggcccaacaaccagtttgacacagagatgctgcaagccatgatcttggcgtccgccagtgaagctgctgatgggagctccaccctgggagggggtgccggcaccatgggattgagcgcccgctacggaccccagttcaccctgcagcacgtgcccgactaccgccagaatgtctacatcccaggcagcaatgccacactgaccaacgcagctggcaagcgggatggcaaggccccagcaggtggcaatggcaacaagaagaagtcgggcaagaaggagaagaagtaacatggaggccaggccaagagccacagggcggcctctccccaaccagcccagcttctccttacctgcacccaggcctcagagtttcagggctaacccccagaatactggtaggggccaaggccatgctccccttgggaaacagaaacaagtgcccagtcagcacctaccccttcccccccagggggttgaatatgcaaaagcagttccgctgggaacccccatccaatcaactgctgtacccatgggggtagtggggttactgtagacaccaagaaccatttgccacaccccgtttagttacagctgaactcctccatcttccaaatcaatcaggcccatccatcccatgcctccctcctccccaccccactccaacagttcctctttcccgagtaaggtggttggggtgttgaagtaccaagtaacctacaagcctcctagttctgaaaagttggaagggcatcatgacctcttggcctctcctttgattctcaatcttcccccaaagcatggtttggtgccagccccttcacctccttccagagcccaagatcaatgctcaagttttggaggacatgatcaccatccccatggtactgatgcttgctggatttagggagggcattttgctaccaagcctcttcccaacgccctggggaccagtcttctgttttgtttttcattgtttgacgtttccactgcatgccttgacttcccccacctcctcctcaaacaagagactccactgcatgttccaagacagtatggggtggtaagataaggaagggaagtgtgtggatgtggatggtgggggcatggacaaagcttgacacatcaagttatcaaggccttggaggaggctctgtatgtcctcaggggactgacaacatcctccagattccagccataaaccaataactaggctggacccttcccactacataatagggctcagcccaggcagccagctttgggctgagctaacaggaccaatggattaaactggcatttcagtccaaggaagctcgaagcaggtttaggaccaggtccccttgagaggtcagaggggcctctgtgggtgctgggtactccagaggtgccactggtggaagggtcagcggagccccagcaggaagggtgggccagccaggccattcttagtccctgggttggggaggcagggagctagggcagggaccaaatgaacagaaagtctcagcccaggatggggcttcttcaacagggcccctgccctcctgaagcctcagtccttcaccttgccaggtgccgtttctcttccgtgaaggccactgcccaggtccccagtgcgccccctagtggccatagcctggttaaagttccccagtgcctccttgtgcatagaccttcttctcccacccccttctgcccctgggtccccggccatccagcggggctgccagagaaccccagacctgcccttacagtagtgtagcgccccctccctctttcggctggtgtagaatagccagtagtgtagtgcggtgtgcttttacgtgatggcgggtgggcagcgggcggcgggctccgcgcagccgtctgtccttgatctgcccgcggcggcccgtgttgtgttttgtgctgtgtccacgcgctaaggcgaccccctcccccgtactgacttctcctataagcgcttctcttcgcatagtcacgtagctcccaccccaccctcttcctgtgtctcacgcaagttttatactctaatatttatatggctttttttcttcgacaaaaaaataataaaacgtttcttctgaaaagctg

SEQ ID NO: 27 - DNA, 4602 bp, Homo sapiens
atgaaagcgagctcagggaggtgcgggctggtgcggtggctgcaggtactgttgcccttcctgttgtctttgttccccggggctctcccagtccagatccgctattcaattccagaggagctggccaaaaactcggtcgtaggaaacctcgccaaggatctggggctcagcgtccgggacttgccagcccggaagctgcgggttagcgcggagaaggaatatttcacagtaaacccagaaagcggagacttacttgtgagtgacagaatagaccgagaacagatatgcgggaagcagcctctgtgtgttctggatttcgatactgtcgctgaaaatccactaaatattttctacatagcagtaattgtgcaggatataaatgataataccccgctattcaaacagactaagattaatttaaaaattggcgaatccactaagccaggtacaacatttccacttgacccagccctggattcagatgttggtcctaactcactacaaagataccaccttaatgacaacgagtactttgatctcgctgagaaacagactccagatggtcgtaaatatcctgagttgattctaaaacactctctggacagagaagagcacagtttacatcaattggtcctcacagctgtggatggcggagacccacctcaaagtggcacgacccaaatccgaatcaaagtcacggatgccaacgataaccctccagtgttcagccaggacgtgtacagggtcaccctgagggaggacgtgccgccgggcttctttgtgcttcaagtgacagccaccgaccgggatgaaggcataaacgcagagatcacctactcctttcataatgtggacgaacaagtgaaacactttttcaacttaaatgaaaaaacaggagaaatcacgacaaaggatgatttggattttgagattgcaagtagttacactctgagtatcgaagcaaaagatcctggagatctagcagcccactgcagtatccaagttgaaattcttgatgacaacgattgtgcacctgaagttattgtgacttcagtatctactcccctaccggaggattcgccaccaggaacagtgatcgccttgataaaaacgagagacagagactctggagaaaatggagaagtttactgccaagtgttgggaaatgccaagtttattttgaaatcttcctcaaagaactattacaaactagtgacagacggcgctctggaccgggaggagatcccagaatacaatctcaccatcacagccaccgacgggggcaagccgcccctctcctccagcataattgtcaccctgcacatctccgacgtcaacgataatgccccagttttccaacagacttcctacatggttcacgtggcagagaacaatcctcctggcgcctctatcgctcaaatcagtgcctctgaccctgacttgggccccagtggccaagtttcctactccatcgtagcgagcgacctgaagccgcgggagattttatcctacgtgtccgtgagcgcgcagagcggggtggtgttcgcgcagcgcgccttcgatcatgagcagctgcgcgccttcgagctcacactgcaggcccgcgaccagggctcgcccgcgctcagcgccaacgtgagcctgcgcgtgttagtgggcgacctcaatgacaatgcgccacgggtgctgtaccccgcgctggggcctgatggctccgccctcttcgatatggtgccacgcgccgcagagcccggctacctggtgaccaaggtggtggcggtggacgcagactcaggacacaacgcttggctgtcctaccacgtgctgcaggccagcgagcccgggctcttcagcctggggttgcgcacgggtgaggtgcgcacagcgcgtgccttgggcgacagggacgcggcccgccagcgcctgctggtcgctgtgcgtgatggaggacagccgccactctccgctacggccacgctgcacctaatcttcgcggatagcctgcaagaggtattgccagacctcagcgaccgccgggagccctctgacccccaggcaaaactgcagttttacctggttgtggccttggccttgatctcagtgctcttcttcctcgcggtgattctggcaatctccctgcgcctgcgactctcttccaggtcagatgcttgggactgttttcagcctggtctcagctccaagcctggacctggggttctccccaattacagtgagggtacattgccctattcctacaacctgtgtgttgcctcacaatcagccaagacagagttcaattttctgaacataaccccggaattggttcccgcgcaagatctcgtctgtgacaatgcctcttgggaacaaaatacaaatcatggagccgctggggtcccttttgcctcagatactattttgaagcaagccccgcccaacacggactggcgtttctctcaggcccagagacccggcaccagcggctcccaaaatggcgatgacaccggcacctggcccaacaaccagtttgacacagagatgctgcaagccatgatcttggcgtccgccagtgaagctgctgatgggagctccaccctgggagggggtgccggcaccatgggattgagcgcccgctacggaccccagttcaccctgcagcacgtgcccgactaccgccagaatgtctacatcccaggcagcaatgccacactgaccaacgcagctggcaagcgggatggcaaggccccagcaggtggcaatggcaacaagaagaagtcgggcaagaaggagaagaagtaacatggaggccaggccaagagccacagggcggcctctccccaaccagcccagcttctccttacctgcacccaggcctcagagtttcagggctaacccccagaatactggtaggggccaaggccatgctccccttgggaaacagaaacaagtgcccagtcagcacctaccccttcccccccagggggttgaatatgcaaaagcagttccgctgggaacccccatccaatcaactgctgtacccatgggggtagtggggttactgtagacaccaagaaccatttgccacaccccgtttagttacagctgaactcctccatcttccaaatcaatcaggcccatccatcccatgcctccctcctccccaccccactccaacagttcctctttcccgagtaaggtggttggggtgttgaagtaccaagtaacctacaagcctcctagttctgaaaagttggaagggcatcatgacctcttggcctctcctttgattctcaatcttcccccaaagcatggtttggtgccagccccttcacctccttccagagcccaagatcaatgctcaagttttggaggacatgatcaccatccccatggtactgatgcttgctggatttagggagggcattttgctaccaagcctcttcccaacgccctggggaccagtcttctgttttgtttttcattgtttgacgtttccactgcatgccttgacttcccccacctcctcctcaaacaagagactccactgcatgttccaagacagtatggggtggtaagataaggaagggaagtgtgtggatgtggatggtgggggcatggacaaagcttgacacatcaagttatcaaggccttggaggaggctctgtatgtcctcaggggactgacaacatcctccagattccagccataaaccaataactaggctggacccttcccactacataatagggctcagcccaggcagccagctttgggctgagctaacaggaccaatggattaaactggcatttcagtccaaggaagctcgaagcaggtttaggaccaggtccccttgagaggtcagaggggcctctgtgggtgctgggtactccagaggtgccactggtggaagggtcagcggagccccagcaggaagggtgggccagccaggccattcttagtccctgggttggggaggcagggagctagggcagggaccaaatgaacagaaagtctcagcccaggatggggcttcttcaacagggcccctgccctcctgaagcctcagtccttcaccttgccaggtgccgtttctcttccgtgaaggccactgcccaggtccccagtgcgccccctagtggccatagcctggttaaagttccccagtgcctccttgtgcatagaccttcttctcccacccccttctgcccctgggtccccggccatccagcggggctgccagagaaccccagacctgcccttacagtagtgtagcgccccctccctctttcggctggtgtagaatagccagtagtgtagtgcggtgtgcttttacgtgatggcgggtgggcagcgggcggcgggctccgcgcagccgtctgtccttgatctgcccgcggcggcccgtgttgtgttttgtgctgtgtccacgcgctaaggcgaccccctcccccgtactgacttctcctataagcgcttctcttcgcatagtcacgtagctcccaccccaccctcttcctgtgtctcacgcaagttttatactctaatatttatatggctttttttcttcgacaaaaaaataataaaacgtttcttctgaaaagctg

SEQ ID NO: 28 - DNA, 4602 bp, Homo sapiens
atggcgagtccacctaggggctggggctgcggagagctgctgctgcccttcatgctcctggggacgctgtgcgagccaggatccgggcagatccgctactcgatgccggaggagctggacaaaggctccttcgtcggcaacatagccaaggaccttgggctggagccccaggagctggcggagcgcggagtccgcatcgtctccagaggtaggacgcagctttttgccctgaacccgcgaagcggcagcttggtcaccgcgggcaggatagaccgggaggagctctgcgctcagagcccactgtgtgtggtgaactttaacatcttggttgagaacaaaatgaaaatttatggagtagaagtagaaataatcgatattaatgataacttcccgcgtttccgggatgaagagttaaaagtaaaagttaatgaaaatgcggctgcagggacacggttagtgcttcccttcgcgcgggatgcggatgtgggtgtgaactctctccggagttaccagctcagctccaatctgcacttctctctggatgtggtaagcggaactgatggacaaaagtatccggagctggtgttggaacagcccctagaccgcgagaaagagactgttcacgacctcctcctcacagctttagatggcggagacccggtactctccggcaccacgcacatccgtgttacggtcctcgacgcaaacgacaatgcgcccctgttcaccccatccgagtacagcgtgagtgttccagagaacatacctgtgggcactcggctgctcatgctaaccgccacggatccagatgagggaataaacgggaaattgacctactcttttcgcaatgaagaagaaaaaatttcggagactttccaacttgattccaacctgggggaaatctcaactctacaatcactggactatgaagaatccagattctacctcatggaagtggtagctcaggatggaggcgctcttgttgccagcgctaaggtggtggtcacagtacaggacgtgaatgacaatgcccccgaagtgatcctcacctctctgaccagttcgatctctgaagactgtcttcccggaactgtaatcgcgctgtttagcgtacatgatggtgattctggagaaaatggtgagattgcatgctctattcctaggaatttgccttttaaattggagaagtcagttgataattactatcacctattaacaactagggacctggacagagaagagacttcagattataatatcactttaaccgtcatggaccatggaaccccgcccctctctacagaaagccacatccccttgaaagtagcagacgttaatgacaacccacccaatttccctcaagcctcctactccacctctgtcacagaaaacaatcccagaggtgtctctatcttctctgtgacagcccatgaccccgacagcggcgacaacgctcgagtcacctactccctggctgaagacacatttcagggggcgcccttgtcctcctatgtatccattaactctgacaccggtgtcctgtatgctctgagatccttcgactatgagcagttgagagacctacagttgtgggtgacagccagcgacagtgggaaccctccacttagcagcaacgtgtcgctgagcctgtttgtgctggaccagaacgacaatacgcctgagatcctgtaccccgccctccccacagacggttccacgggcgtggagctggcgcctcgctccgcagaacctggctacctggtgaccaaggtggtagcggtggacaaagattcaggccagaacgcctggctgtcctaccgcctgcttaaggccagcgagccaggactctttgcggttgggctgcacacgggcgaggtgcgcacagcgcgagccctgctggacagagacgcgctcaagcagagcctcgtggtggccgtcgaagaccatggccagccccctctgtcagccaccttcacggtcaccgttgccgtggccgacaggatccctgacatcctggctgacctaggcagtatcaagacccccattgaccctgaggatctggacctcacactctatcttgtggtggcagtggctgcagtctcctgcgtcttcctggccttcgtcatcgtgctgctggtgctcagactgaggcgctggcacaagtcacgcctgcttcaggctgaaggcagcaggttggcgggtgtgcccgcctcgcactttgtgggcgtggatggggttcgggctttcctgcagacctattcccacgaggtctccctcaccgcggactcgaggaagagtcacctgatctttccccagcccaactacgcagacacgctccttagtgaagagagctgtgagaaaagcgagcctcttctgatgtctgataaggtagatgcaaacaaagaagaacggcgagttcagcaagccccgcccaacacggactggcgtttctctcaggcccagagacccggcaccagcggctcccaaaatggcgatgacaccggcacctggcccaacaaccagtttgacacagagatgctgcaagccatgatcttggcgtccgccagtgaagctgctgatgggagctccaccctgggagggggtgccggcaccatgggattgagcgcccgctacggaccccagttcaccctgcagcacgtgcccgactaccgccagaatgtctacatcccaggcagcaatgccacactgaccaacgcagctggcaagcgggatggcaaggccccagcaggtggcaatggcaacaagaagaagtcgggcaagaaggagaagaagtaacatggaggccaggccaagagccacagggcggcctctccccaaccagcccagcttctccttacctgcacccaggcctcagagtttcagggctaacccccagaatactggtaggggccaaggccatgctccccttgggaaacagaaacaagtgcccagtcagcacctaccccttcccccccagggggttgaatatgcaaaagcagttccgctgggaacccccatccaatcaactgctgtacccatgggggtagtggggttactgtagacaccaagaaccatttgccacaccccgtttagttacagctgaactcctccatcttccaaatcaatcaggcccatccatcccatgcctccctcctccccaccccactccaacagttcctctttcccgagtaaggtggttggggtgttgaagtaccaagtaacctacaagcctcctagttctgaaaagttggaagggcatcatgacctcttggcctctcctttgattctcaatcttcccccaaagcatggtttggtgccagccccttcacctccttccagagcccaagatcaatgctcaagttttggaggacatgatcaccatccccatggtactgatgcttgctggatttagggagggcattttgctaccaagcctcttcccaacgccctggggaccagtcttctgttttgtttttcattgtttgacgtttccactgcatgccttgacttcccccacctcctcctcaaacaagagactccactgcatgttccaagacagtatggggtggtaagataaggaagggaagtgtgtggatgtggatggtgggggcatggacaaagcttgacacatcaagttatcaaggccttggaggaggctctgtatgtcctcaggggactgacaacatcctccagattccagccataaaccaataactaggctggacccttcccactacataatagggctcagcccaggcagccagctttgggctgagctaacaggaccaatggattaaactggcatttcagtccaaggaagctcgaagcaggtttaggaccaggtccccttgagaggtcagaggggcctctgtgggtgctgggtactccagaggtgccactggtggaagggtcagcggagccccagcaggaagggtgggccagccaggccattcttagtccctgggttggggaggcagggagctagggcagggaccaaatgaacagaaagtctcagcccaggatggggcttcttcaacagggcccctgccctcctgaagcctcagtccttcaccttgccaggtgccgtttctcttccgtgaaggccactgcccaggtccccagtgcgccccctagtggccatagcctggttaaagttccccagtgcctccttgtgcatagaccttcttctcccacccccttctgcccctgggtccccggccatccagcggggctgccagagaaccccagacctgcccttacagtagtgtagcgccccctccctctttcggctggtgtagaatagccagtagtgtagtgcggtgtgcttttacgtgatggcgggtgggcagcgggcggcgggctccgcgcagccgtctgtccttgatctgcccgcggcggcccgtgttgtgttttgtgctgtgtccacgcgctaaggcgaccccctcccccgtactgacttctcctataagcgcttctcttcgcatagtcacgtagctcccaccccaccctcttcctgtgtctcacgcaagttttatactctaatatttatatggctttttttcttcgacaaaaaaataataaaacgtttcttctgaaaagctg

SEQ ID NO: 29 - DNA, 4596 bp, Homo sapiens
atgggaaatagctccggatggaggggcccagcagggcagaggcgaatgctatttctcttcctgctctctttgttagaccaggttctctccgaaccgatccgctacgctattcccgaggagctggacaggggctcgctggtagggaacctcgccaaggacctggggtttggcgtgggggatttacctactaggaacctgcgggttattgcagagaagaaattctttaccgtgagccccgaaaatgggaacttacttgtgagcgaccgtatagaccgagaggagatttgtggcaagaagtcgacgtgtgttctggaatttgaaatggttgctgaaaagcctttaaacttttttcatgtaactgtgctgatccaggatattaacgacaacccaccgacctttagccaaaatatcactgagctggaaatcagcgaactggctctcactggagccacatttgccctggaatctgcgcaagatcctgatgtaggtgtcaattcgctgcagcagtactacctcagccctgatccgcacttctctttgattcagaaggagaacctggatggcagtaggtacccagagctagtactgaaagcacccctggacagggaagagcagccacatcaccacctggtcctcacagctgtggatgggggcgagccctccagaagctgtaccacccagatcagggtaattgtcgcagatgcaaatgataaccccccagtatttactcaggacatgtacagggtcaatgttgcagagaacctgcccgctggctcctccgtattaaaagtgatggccattgacatggatgagggcatcaatgccgaaatcatctatgccttcatcaatattggcaaggaagtgagacaactgttcaagctggacagtaaaacgggggaactcaccactattggagaactggactttgaagagagagatagctacacaattggggtggaagcaaaggatggtggacatcacactgcatattgtaaagtacagatagatatttcagatgaaaatgacaatgccccggagataaccctggcttctgaatcccaacatatacaagaagatgctgagctggggactgccgttgccctgatcaaaacacatgatctagattctggatttaatggagaaatcctatgccaactaaaaggaaacttcccctttaaaatcgttcaagataccaaaaacacatacaggttggtgacagatggagccctggaccgggagcagatcccagaatacaatgtgacgatcacagctaccgacaaaggcaatccaccgctctcctccagcaagaccatcactctgcacatccttgatgtcaacgacaacgttcccgttttccaccaggcctcctacaccgtgcatgtagctgagaacaatccgcctggagcctccattgcgcatgtcagagcctcggatcccgacttgggacctaatggccttgtctcctactacatcgtggccagtgacctggagccgcgggagctgtcgtcctacgtgtccgtgagcgcgcggagcggggtggtgttcgcgcagcgagccttcgaccacgagcagctgcgtgccttcgagctcactctgcaggcccgcgaccagggctcgcctacgctcagcgccaacgtgagcctgcgcgtgttggtggacgaccgcaacgacaatgcaccgctggtgctgtacccagctctggggcccgaaggctctgcgctcttcgatatggtgccgcgctctgcagagcctggctacctggtgaccaaggtggtggcggtggacgcagactcgggatacaacgcctggctgtcctaccacattgtgcaggccagcgagcccgggctgttcagcctgggcctgcgcacgggtgaggtgcgcacggcgcgtaccttgggcgacagggaggccgcccgccagcgcctgctggtcactgtgcgtgatggaggacagcagcctctttcagccaccgtcatgctgcacctaatcttcgcagatagcttgcaagagatacaacctgaccttagcgaccgccccactccctctgaccctcaggcggagctacagtttcacctagtagtggcgttggccttgatctcagtgctcttcctcctcgcggtgattctggcaatctccctgcgcctgcgatgctcctccagacccgccactgagggctactttcagcctggtgtctgcttcaagactgtacctggagttctccccacctacagcgaaaggactttgccttattcctacaatccgtgtgctgcctcacattcctcaaacaccgagtttaaatttctcaatataaaggctgaaaatgctgcaccacaagatcttctatgtgatgaagcctcttggtttgaaagtaatgacaatccagaaatgccttctaattcaggcaatttgcaaaagcaagccccgcccaacacggactggcgtttctctcaggcccagagacccggcaccagcggctcccaaaatggcgatgacaccggcacctggcccaacaaccagtttgacacagagatgctgcaagccatgatcttggcgtccgccagtgaagctgctgatgggagctccaccctgggagggggtgccggcaccatgggattgagcgcccgctacggaccccagttcaccctgcagcacgtgcccgactaccgccagaatgtctacatcccaggcagcaatgccacactgaccaacgcagctggcaagcgggatggcaaggccccagcaggtggcaatggcaacaagaagaagtcgggcaagaaggagaagaagtaacatggaggccaggccaagagccacagggcggcctctccccaaccagcccagcttctccttacctgcacccaggcctcagagtttcagggctaacccccagaatactggtaggggccaaggccatgctccccttgggaaacagaaacaagtgcccagtcagcacctaccccttcccccccagggggttgaatatgcaaaagcagttccgctgggaacccccatccaatcaactgctgtacccatgggggtagtggggttactgtagacaccaagaaccatttgccacaccccgtttagttacagctgaactcctccatcttccaaatcaatcaggcccatccatcccatgcctccctcctccccaccccactccaacagttcctctttcccgagtaaggtggttggggtgttgaagtaccaagtaacctacaagcctcctagttctgaaaagttggaagggcatcatgacctcttggcctctcctttgattctcaatcttcccccaaagcatggtttggtgccagccccttcacctccttccagagcccaagatcaatgctcaagttttggaggacatgatcaccatccccatggtactgatgcttgctggatttagggagggcattttgctaccaagcctcttcccaacgccctggggaccagtcttctgttttgtttttcattgtttgacgtttccactgcatgccttgacttcccccacctcctcctcaaacaagagactccactgcatgttccaagacagtatggggtggtaagataaggaagggaagtgtgtggatgtggatggtgggggcatggacaaagcttgacacatcaagttatcaaggccttggaggaggctctgtatgtcctcaggggactgacaacatcctccagattccagccataaaccaataactaggctggacccttcccactacataatagggctcagcccaggcagccagctttgggctgagctaacaggaccaatggattaaactggcatttcagtccaaggaagctcgaagcaggtttaggaccaggtccccttgagaggtcagaggggcctctgtgggtgctgggtactccagaggtgccactggtggaagggtcagcggagccccagcaggaagggtgggccagccaggccattcttagtccctgggttggggaggcagggagctagggcagggaccaaatgaacagaaagtctcagcccaggatggggcttcttcaacagggcccctgccctcctgaagcctcagtccttcaccttgccaggtgccgtttctcttccgtgaaggccactgcccaggtccccagtgcgccccctagtggccatagcctggttaaagttccccagtgcctccttgtgcatagaccttcttctcccacccccttctgcccctgggtccccggccatccagcggggctgccagagaaccccagacctgcccttacagtagtgtagcgccccctccctctttcggctggtgtagaatagccagtagtgtagtgcggtgtgcttttacgtgatggcgggtgggcagcgggcggcgggctccgcgcagccgtctgtccttgatctgcccgcggcggcccgtgttgtgttttgtgctgtgtccacgcgctaaggcgaccccctcccccgtactgacttctcctataagcgcttctcttcgcatagtcacgtagctcccaccccaccctcttcctgtgtctcacgcaagttttatactctaatatttatatggctttttttcttcgacaaaaaaataataaaacgtttcttctgaaaagctg

SEQ ID NO: 30 - DNA, 4605 bp, Homo sapiens
atggcgcctccgcagaggcatccgcagcgcagcgagcaggtcctgctcctcacgctcctggggacgctgtggggggccgcggcagcgcagatccgctactctattcccgaggagctggagaaaggctccttcgtaggcaacatcgtcaaggatctgggactggagccccaggagttggcggagcacggagtccgcatcgtctccagaggtaggatgcagcttttctctctgaatccgcgaaacggcagcttggtcaccgcgggtaggatagaccgcgaggagctctgtgctcagagcccgcggtgtctggtgagttttaacatccttgtcgaggataaactgaatctttatcccgtggaagtggaaatagtggacattaatgacaatacaccccgattcttaaaggaagaattggaagtgaaaattctcgaaaacgcagctccatcctctcgttttccactaatggaggtctatgaccctgatgtgggaatgaactcccttcagggatttaagctcagtggtaatagtcacttctcagtggacgtgcaaagcgaagcccatgggcccaagtacccggagctggtgctggagggcacactggaccgggaaggagaagccgtttaccgcctggtccttactgccatggatggcggcgaccctgtccgctcaagcgtcgcccaaattctggtaacagttctagatgtgaatgacaacactccaatgtttactcagcctgtctaccgtgtaagtgttcctgaaaacctgccagtaggcacaccagtgttggcagtgactgccaccgaccaggatgaaggagtccacggggaagtaacttattcctttgtgaagattacagaaaagatctcacaaattttctgtttgaatgttttgactggagaaatttcaacttctgcaaatctagactatgaggactcgagtttttatgagctgggtgttgaagcccgggatgggccaggtcttcgagacagagcgaaagtcttaataactatcttggatgtcaatgataatgtaccagaagtggttgttacatctggaagcagaacaattgctgaaagtgcacctccaggaacagtaatcgccctttttcaagtgttcgatcgagactctggcctgaatggcctggtaacctgttccatcccgagaagtctcccatttgaattggaaaaatcagttggcaattattatcgattagtgacaaatgcagctctagaccgggaagaggtattcttgtacaacatcactgtgacagccacggacaaaggaacaccacctctgtctacagaaacaatcatctctctaaatgtggcagacaccaacgacaacccgcccaccttcccccattcatcctactcagtctatgtccttgaaaacaaccccaggggtgcctccatcttctctgtgaatgcactggaccctgacgtggaccagaacgcccaagtctcctactcactggcagaagacaccctccagggggcgcccctgtcctcctacgtgtccatcaactccgacactgggattctgtacgccctgcgctccttcgactatgagcagttgagagacctacagctgtgggtgacagccagcgacagcggggacccgcctcttagcagcaacgtgtcactgagcctgtttgtgctggaccagaatgacaatgcgcccgagatcctgtaccccgccctccccacagacggttccactggcgtggagctggcgccccgctccgcagagcccggctacctggtgaccaaggtggtggcggtggacagagactcgggccagaacgcctggctgtcctaccgcctgctcaaggccagcgagccaggacttttctcagtgggcctgcacacgggcgaggtgcgcacggcgcgcgccctgctggacagagacgcgctcaagcagagcctagtggtggccgtccaggaccacggccagccccctctctccgccactgtcacgctcaccgtggccgtggccgacaggatccccgacatcctggccgacctgggcagcctcgagccctccgccaaacccaacgattcggacctcactctgtacctggtggtggcggtggccgcggtctcctgcgtcttcctggccttcgtcatcgtgctgctggcgctcagactgcagcgctggcacaagtcacgcctgctgcaggcttcgggaggtggcttagcgagcatgcccggctcgcactttgtgggcgtggaaggggttcgggctttcctgcagacctattcccacgaggtctcactcactgcagactcgcgtaagagtcatctgattttcccccagcccaactatgccgacacgcttatcaaccaggagagctatgagaaaagcgagcctcttctgataactcaggatttacttgaaacgaaaggagaacccaggcaacttcagcaagccccgcccaacacggactggcgtttctctcaggcccagagacccggcaccagcggctcccaaaatggcgatgacaccggcacctggcccaacaaccagtttgacacagagatgctgcaagccatgatcttggcgtccgccagtgaagctgctgatgggagctccaccctgggagggggtgccggcaccatgggattgagcgcccgctacggaccccagttcaccctgcagcacgtgcccgactaccgccagaatgtctacatcccaggcagcaatgccacactgaccaacgcagctggcaagcgggatggcaaggccccagcaggtggcaatggcaacaagaagaagtcgggcaagaaggagaagaagtaacatggaggccaggccaagagccacagggcggcctctccccaaccagcccagcttctccttacctgcacccaggcctcagagtttcagggctaacccccagaatactggtaggggccaaggccatgctccccttgggaaacagaaacaagtgcccagtcagcacctaccccttcccccccagggggttgaatatgcaaaagcagttccgctgggaacccccatccaatcaactgctgtacccatgggggtagtggggttactgtagacaccaagaaccatttgccacaccccgtttagttacagctgaactcctccatcttccaaatcaatcaggcccatccatcccatgcctccctcctccccaccccactccaacagttcctctttcccgagtaaggtggttggggtgttgaagtaccaagtaacctacaagcctcctagttctgaaaagttggaagggcatcatgacctcttggcctctcctttgattctcaatcttcccccaaagcatggtttggtgccagccccttcacctccttccagagcccaagatcaatgctcaagttttggaggacatgatcaccatccccatggtactgatgcttgctggatttagggagggcattttgctaccaagcctcttcccaacgccctggggaccagtcttctgttttgtttttcattgtttgacgtttccactgcatgccttgacttcccccacctcctcctcaaacaagagactccactgcatgttccaagacagtatggggtggtaagataaggaagggaagtgtgtggatgtggatggtgggggcatggacaaagcttgacacatcaagttatcaaggccttggaggaggctctgtatgtcctcaggggactgacaacatcctccagattccagccataaaccaataactaggctggacccttcccactacataatagggctcagcccaggcagccagctttgggctgagctaacaggaccaatggattaaactggcatttcagtccaaggaagctcgaagcaggtttaggaccaggtccccttgagaggtcagaggggcctctgtgggtgctgggtactccagaggtgccactggtggaagggtcagcggagccccagcaggaagggtgggccagccaggccattcttagtccctgggttggggaggcagggagctagggcagggaccaaatgaacagaaagtctcagcccaggatggggcttcttcaacagggcccctgccctcctgaagcctcagtccttcaccttgccaggtgccgtttctcttccgtgaaggccactgcccaggtccccagtgcgccccctagtggccatagcctggttaaagttccccagtgcctccttgtgcatagaccttcttctcccacccccttctgcccctgggtccccggccatccagcggggctgccagagaaccccagacctgcccttacagtagtgtagcgccccctccctctttcggctggtgtagaatagccagtagtgtagtgcggtgtgcttttacgtgatggcgggtgggcagcgggcggcgggctccgcgcagccgtctgtccttgatctgcccgcggcggcccgtgttgtgttttgtgctgtgtccacgcgctaaggcgaccccctcccccgtactgacttctcctataagcgcttctcttcgcatagtcacgtagctcccaccccaccctcttcctgtgtctcacgcaagttttatactctaatatttatatggctttttttcttcgacaaaaaaataataaaacgtttcttctgaaaagctg

SEQ ID NO: 31 - DNA, 4605 bp, Homo sapiens
atggcggctcagccgaggggcggggactacagaggattcttcctgctctccatcctcctggggaccccctgggaagcctgggcaggacgtattctctactccgtgtcggaggagacggacaaagggtcctttgtgggagacatcgccaaggacctggggctggagccccgggagctggcggagcgcggagtccgcatcatctccagaggtaggacgcagcttttcgccctgaaccagcgcagcggcagcttggtcactgcgggcaggatagaccgggaagagatctgcgctcagagtgcgcggtgtctggtaaactttaacatcctgatggaagataaaatgaatctttaccctatagacgtggaaataatagatattaatgacaacgttccaagattcttgacggaagaaataaatgtaaaaataatggagaatacagctcctggggttcggtttccgttaagcgaggctggggatccagatgtgggcacgaactccctccagagttaccagctcagccccaatcgccacttctccctggctgtgcaaagtggagacgatgaaactaagtacccggaactggtgctggagcgggtgctggaccgggaggaagagcgggttcaccacctggtcctcacagcctctgatggcggcgacccgccccgatccagcaccgcccacatccaggtgacagtggtggatgtgaatgaccacacgcctgtcttctctctgcctcagtaccaagtaactgtccccgagaatgtgccagtgggtacaagactgctcacggtacatgctatcgacctggacgagggagtcaatggggaagtgacatattcttttcggaaaataactcctaaacttccaaagatgtttcatctgaactcgcttacaggagaaatatcaactttagaaggattagattatgaagaaactgccttctatgaaatggaggttcaggctcaagatggtcctggtagtctgacaaaggcaaaagtactgatcacagttttagatgtaaatgataatgctccagaagtgactatgacgtctttaagtagctcaatccctgaagacacacctcttgggacagtcattgctcttttctacctacaagacagagattctggaaagaatggtgaggtgacctgcaccattccagaaaacctaccttttaaattagaaaaatcaatagataattattatagattggtcacaaccaaaaacttggaccgggaaacactctctttgtataacatcacactgaaagccacagatggtggaactcctcccttgtccagggaaactcacatattcatgcaggtggcagacaccaacgataacccacccaccttcccccactcatcctactcagtctacatcgctgagaacaaccccagaggggcctccattttcttagtgactgcacaggaccacgacagtgaggataatgcccagatcacttattccttggccgaagacaccatccagggggctccagtgtcctcctatgtctccataaactctgacactggagtcctgtacgcgctgcaatcctttgattatgagcagttgagagaactacaactaagagtgactgcacatgacagcggggacccgcctctcagcagcaacatgtcactgagcctgttcgtgctggaccagaatgacaacccgcccgagatcctgtacccggccctccccacagatggttctactggcatggagctggcaccccgctccgcagagcccggctacctggtgaccaaggtggtggcggtggacaaagattcaggccagaacgcctggctgtcatacctcctgcttaaggccagcgagccaggactctttgcggttgggctgtacacgggcgaggtgcgcacggctcgggccctgctggacagagatgccctcaagcagagcctcgtggtggccgtccaggaccacggtcagcctcctctgtcagccaccgtcacactcaccgtggctgtggctgacagcatccccgaagtcttggccgacctgggcagccttgagccctccgacggtccttacaactatgacctcacgttgtacctggtggtggcggtggccacagtctcctgcgtcttcctagccttcgtcctcgtactgctggcgctcaggctgcggcgctggcacaagtcacgcctgctgcaggcttcagaaggtggcttggcgaacgtgcccacctcgcactttgtgggcatggacggggtgcaggctttcctgcagacctattcccatgaggtctccctcaccgcggactctcggaagagtcacctgatcttcccccagcccaactatgtagacatgctcatcagccaggagagctgtgagaaaaatgattctttgctaacatccgtagattttcaggaatgtaaagaaaacctgccaagtattcagcaagccccgcccaacacggactggcgtttctctcaggcccagagacccggcaccagcggctcccaaaatggcgatgacaccggcacctggcccaacaaccagtttgacacagagatgctgcaagccatgatcttggcgtccgccagtgaagctgctgatgggagctccaccctgggagggggtgccggcaccatgggattgagcgcccgctacggaccccagttcaccctgcagcacgtgcccgactaccgccagaatgtctacatcccaggcagcaatgccacactgaccaacgcagctggcaagcgggatggcaaggccccagcaggtggcaatggcaacaagaagaagtcgggcaagaaggagaagaagtaacatggaggccaggccaagagccacagggcggcctctccccaaccagcccagcttctccttacctgcacccaggcctcagagtttcagggctaacccccagaatactggtaggggccaaggccatgctccccttgggaaacagaaacaagtgcccagtcagcacctaccccttcccccccagggggttgaatatgcaaaagcagttccgctgggaacccccatccaatcaactgctgtacccatgggggtagtggggttactgtagacaccaagaaccatttgccacaccccgtttagttacagctgaactcctccatcttccaaatcaatcaggcccatccatcccatgcctccctcctccccaccccactccaacagttcctctttcccgagtaaggtggttggggtgttgaagtaccaagtaacctacaagcctcctagttctgaaaagttggaagggcatcatgacctcttggcctctcctttgattctcaatcttcccccaaagcatggtttggtgccagccccttcacctccttccagagcccaagatcaatgctcaagttttggaggacatgatcaccatccccatggtactgatgcttgctggatttagggagggcattttgctaccaagcctcttcccaacgccctggggaccagtcttctgttttgtttttcattgtttgacgtttccactgcatgccttgacttcccccacctcctcctcaaacaagagactccactgcatgttccaagacagtatggggtggtaagataaggaagggaagtgtgtggatgtggatggtgggggcatggacaaagcttgacacatcaagttatcaaggccttggaggaggctctgtatgtcctcaggggactgacaacatcctccagattccagccataaaccaataactaggctggacccttcccactacataatagggctcagcccaggcagccagctttgggctgagctaacaggaccaatggattaaactggcatttcagtccaaggaagctcgaagcaggtttaggaccaggtccccttgagaggtcagaggggcctctgtgggtgctgggtactccagaggtgccactggtggaagggtcagcggagccccagcaggaagggtgggccagccaggccattcttagtccctgggttggggaggcagggagctagggcagggaccaaatgaacagaaagtctcagcccaggatggggcttcttcaacagggcccctgccctcctgaagcctcagtccttcaccttgccaggtgccgtttctcttccgtgaaggccactgcccaggtccccagtgcgccccctagtggccatagcctggttaaagttccccagtgcctccttgtgcatagaccttcttctcccacccccttctgcccctgggtccccggccatccagcggggctgccagagaaccccagacctgcccttacagtagtgtagcgccccctccctctttcggctggtgtagaatagccagtagtgtagtgcggtgtgcttttacgtgatggcgggtgggcagcgggcggcgggctccgcgcagccgtctgtccttgatctgcccgcggcggcccgtgttgtgttttgtgctgtgtccacgcgctaaggcgaccccctcccccgtactgacttctcctataagcgcttctcttcgcatagtcacgtagctcccaccccaccctcttcctgtgtctcacgcaagttttatactctaatatttatatggctttttttcttcgacaaaaaaataataaaacgtttcttctgaaaagctg

SEQ ID NO: 32 - DNA, 4578 bp, Homo sapiens
atggggagcggcgccggggagctgggccgggctgagaggctgccagtgctctttctcttcctgctgtctttgttctgcccggcgctctgtgagcagatccgctacaggattcccgaggaaatgcccaagggctccgtagtggggaacctcgccacggacctggggttcagcgtccaggagttaccgactcgaaaactgcgcgtcagttcggagaagccttacttcaccgtgagcgcagagagcggggagttgcttgtgagcagcaggctagacagggaggagatatgcgggaagaagccagcttgtgctctggaatttgaggctgttgctgaaaatccactgaacttttatcacgtgaatgtggagatcgaggacattaatgaccacacgccaaaattcacgcaaaattcctttgagctgcaaataagtgagtctgcacagcctggcacacgatttatattaggatctgcccatgatgcggatattggtagcaacacactgcagaattaccaactcagtcccagtgatcatttctcactgataaataaagagaaatcagatggcagtaaataccctgagatggtattgaagacacctttggacagagaaaagcagaaatcctaccacttgactttgactgccttggactttggagctccacccctaagcagcactgcacagatacacgttctagtgactgatgccaatgataatgctccagtgttcagtcaagacgtatacagggtgagcctttcagaaaacgtgtacccggggaccacggtgctacaggtgactgccacggaccaggatgagggtgtcaatgccgagattactttctctttcagtgaagctagccagatcacccaatttgacctgaactctaacaccggggaaattactgttttaaatacattagattttgaagaagtcaaagaatattccatagttttggaagcaagggacggtggaggaatgattgcgcaatgcacagtggaggtagaagtcatagatgaaaatgacaacgccccagaagtgatattccagtctctacccaacctaattatggaggacgccgagctgggaacacatattgctttgctcaaagtccgtgacaaggattccagacacaatggagaagtgacttgtaaattggaaggtgatgttccatttaaaatattaacttcttcaagaaacacgtataaattagtgacagatgctgttctagaccgcgagcagaatccagagtacaatataaccgttacggcaacagatcggggcaagcctcccctctcctccagttccagcatcaccctgcacattggtgatgtaaatgacaacgctccggttttctcacagtcttcctatatagtccacgtggccgagaacaacccgcctggagcctctatttcacaagtcagggcttctgatccggacttggggcccaacggccaagtctcttactgcatcatggccagtgacctggagcagcgggagctgtcatcctacgtgtccataagcgcggagagcggggtggtgttcgcgcagcgcgccttcgaccacgagcagctgcgcgccttcgaactcacactgcaggcccgcgaccagggctcgccagcgctcagcgcgaacgtgagcctgcgcgtgttagtggacgaccgcaacgacaatgcgccacgggtgctgtaccccgcgctgggtcccgacggctctgcgctcttcgatatggtgccgcacgctgcagagcctggctacttggtgaccaaggtagtggcggtggacgcagactcaggacacaacgcctggctgtcctaccacgtgctgcaggctagcgagcccgggctcttcagcctggggctgcgcacgggcgaagtgcgcacagcgcgtgccttaggcgacagggacgccgtccgccagcgccttctggtcgccgtgcgtgacggtggacagccaccactctcggccactgccacgttgcacctggtcttcgccgacagcttgcaggaggtgctgccggatatcactgaccgccccgacccctctgacctccaggctgagctgcagttttacctagtggtggccttggccttgatctcagtgctcttcctcgtggccatgattctggccattgccttgcgcctgcgacgctcctccagccccgcctcctggagctgcttccagcctggtctctgtgttaaatccgaatccgtggttccccccaactacagcgaggggactttgccttattcctacaatctatgtgttgcacatacaggaaagacggagtttaatttcctaaaatgtagtgagcagttgagttcaggacaagacatactttgcggtgattcatctggggccttatttccactttgtaattccagtgaattgacttcccatcagcaagccccgcccaacacggactggcgtttctctcaggcccagagacccggcaccagcggctcccaaaatggcgatgacaccggcacctggcccaacaaccagtttgacacagagatgctgcaagccatgatcttggcgtccgccagtgaagctgctgatgggagctccaccctgggagggggtgccggcaccatgggattgagcgcccgctacggaccccagttcaccctgcagcacgtgcccgactaccgccagaatgtctacatcccaggcagcaatgccacactgaccaacgcagctggcaagcgggatggcaaggccccagcaggtggcaatggcaacaagaagaagtcgggcaagaaggagaagaagtaacatggaggccaggccaagagccacagggcggcctctccccaaccagcccagcttctccttacctgcacccaggcctcagagtttcagggctaacccccagaatactggtaggggccaaggccatgctccccttgggaaacagaaacaagtgcccagtcagcacctaccccttcccccccagggggttgaatatgcaaaagcagttccgctgggaacccccatccaatcaactgctgtacccatgggggtagtggggttactgtagacaccaagaaccatttgccacaccccgtttagttacagctgaactcctccatcttccaaatcaatcaggcccatccatcccatgcctccctcctccccaccccactccaacagttcctctttcccgagtaaggtggttggggtgttgaagtaccaagtaacctacaagcctcctagttctgaaaagttggaagggcatcatgacctcttggcctctcctttgattctcaatcttcccccaaagcatggtttggtgccagccccttcacctccttccagagcccaagatcaatgctcaagttttggaggacatgatcaccatccccatggtactgatgcttgctggatttagggagggcattttgctaccaagcctcttcccaacgccctggggaccagtcttctgttttgtttttcattgtttgacgtttccactgcatgccttgacttcccccacctcctcctcaaacaagagactccactgcatgttccaagacagtatggggtggtaagataaggaagggaagtgtgtggatgtggatggtgggggcatggacaaagcttgacacatcaagttatcaaggccttggaggaggctctgtatgtcctcaggggactgacaacatcctccagattccagccataaaccaataactaggctggacccttcccactacataatagggctcagcccaggcagccagctttgggctgagctaacaggaccaatggattaaactggcatttcagtccaaggaagctcgaagcaggtttaggaccaggtccccttgagaggtcagaggggcctctgtgggtgctgggtactccagaggtgccactggtggaagggtcagcggagccccagcaggaagggtgggccagccaggccattcttagtccctgggttggggaggcagggagctagggcagggaccaaatgaacagaaagtctcagcccaggatggggcttcttcaacagggcccctgccctcctgaagcctcagtccttcaccttgccaggtgccgtttctcttccgtgaaggccactgcccaggtccccagtgcgccccctagtggccatagcctggttaaagttccccagtgcctccttgtgcatagaccttcttctcccacccccttctgcccctgggtccccggccatccagcggggctgccagagaaccccagacctgcccttacagtagtgtagcgccccctccctctttcggctggtgtagaatagccagtagtgtagtgcggtgtgcttttacgtgatggcgggtgggcagcgggcggcgggctccgcgcagccgtctgtccttgatctgcccgcggcggcccgtgttgtgttttgtgctgtgtccacgcgctaaggcgaccccctcccccgtactgacttctcctataagcgcttctcttcgcatagtcacgtagctcccaccccaccctcttcctgtgtctcacgcaagttttatactctaatatttatatggctttttttcttcgacaaaaaaataataaaacgtttcttctgaaaagctg

SEQ ID NO: 33 - DNA, 5503 bp, Homo sapiens
ttcatctgtacctttcaagtattcaaatagaaaaatataaacaatgtaaataaaatagcaaaacaatgtaatatctcataaaactgcaatggtaaaagcatttatcctattgaaattccacaatttttatttgaaaatattatcgacatgtaattcaagtggcatttagaagaataatttaaaagcaacaactctatagaaagcttgtaaaatgattaagtagtttaaaccaaataaaacaatttctgagtcagtcatctccagtaggtctattttagtctcaagataaattcatttctggtgacaactgaagttcttagttatttgttagtatatattggagacatttacaataaagcttagagcacaatgggaaatgaaagtatcatgttttttttaagaccaaatgtattgcagaaatgtgagtaatttaatccgatgctacaatctgatcattctgatctaatctgatcatttaataacactaaataaaaccttcatctcacattctttggctgtttcttttaaaatatgggtttacggataaatcaaataaattcaaaacaaagtaataagcaaatgatttttttttctcagtaatctagtagagtattacatttagaagtaatctgtatctcagtgcagtaactatttaggactgtaagcgccgctgttcacctactggaagacaaatgcaaccgaaaacactcagatctcacacctcacgaagacccgcagatgccacaaactaactgctggactgcagcgaaacccgacccctgtttggaggcactccaggtttccggaggattgtcatctccatagctgcggcaagaaactaaataagacccatttatgcacagtgaagattctgagaggattctgcagcaaaacaacaatggccgctccacagagtcgccccagacgcggcgagctgatcctgctgtgcgcgctgctgggaacgctgtgggaaatcgggaggggacagattcgctactctgtgccagaagagacggacaaaggctccttcgtgggtaatatctccaaggacctggggctggacccccggaagctggcgaagcacggagtccgtatcgtctccagaggtaggacgcagctctttgctctgaacccgcgcagcggcagcttgatcaccgcgggcaggatagatcgggaggagctctgcgctcagagcccgcggtgtctgataaatattaacaccctggttgaggataaaggaaaactctttggggtagaaatagaaataattgatattaacgataataacccaaaattccaggtcgaagatctagaagtaaaaattaacgaaatcgcggttcctggagcacgttatccactcccagaagctgttgacccggatgtgggcgtgaactccctccagagctaccagctcagccccaatcaccacttctccctggacgtgcagactggagacaatggagccataaacccagagctggtgctggagcgcgccctggacagggaggaagaggctgctcaccacctggtcctcacggcctcggatggcggcaagccgcctcgctctagcacagtgcgcatccacgtgacagtgttggatacaaatgacaatgccccggtttttcctcacccgatttaccgagtgaaagtccttgagaacatgcccccaggcacgcggctgcttactgtaacagccagcgacccggatgagggaatcaacggaaaagtggcatacaaattccggaaaattaatgaaaaacaaactccgttattccagcttaatgaaaatactggggaaatatcaatagcaaaaagtctagattatgaagaatgttcattttatgaaatggaaatacaagccgaagatgtgggggcacttctggggaggaccaaattgctcatttcggtggaagatgtaaatgacaatagaccagaagtgatcattacgtctttgtttagcccagtgttagaaaattctcttcccgggacagtaattgccttcttgagtgtgcatgaccaagactctggaaagaatggtcaagttgtctgttacacacgtgataatttaccttttaaattagaaaagtcaataggtaattattatagattagtgacaaggaaatatttggaccgagaaaatgtctctatctacaatatcacagtgatggcctcagatctaggaacaccacctctgtccactgaaactcaaatcgctctgcacgtggcagacattaacgacaaccctcctactttccctcatgcctcctactcagcgtatatcctagagaacaacctgagaggagcctccatcttttccttgactgcacacgaccccgacagccaggagaatgcccaggtcacttactctgtgaccgaggacacgctgcagggggcgcccctgtcctcgtatatctccatcaactctgacaccggtgtcctgtatgcgctgcaatctttcgactatgagcagatccgagacctgcagctactggtaacagccagcgacagcggggacccgcccctcagcagcaacatgtcactgagcctgttcgtgctggaccagaatgacaacgcgcccgagatcctgtaccccgccctccccacagacggttccactggcgtggagctggcgccccgctccgcagagcgtggctacctggtgaccaaggtggtggcggtggacagagactcgggccagaacgcctggctgtcctaccgcctgctcaaggccagcgagccgggactcttctcggtgggtctgcacacgggcgaggtgcgcacggcgcgagccctgctggacagagatgcgctcaagcagagcctcgtggtggccgtccaggaccatggccagccccctctctccgccactgtcacgctcaccgtagccgtggctgacagcatccccgaagtcctgaccgagttgggcagtctgaagccttcggtcgacccgaacgattcgagccttacactctatctcgtggtggcagtggctgccatctcctgtgtcttcctcgcctttgtcgctgtgcttctggggctcaggctgaggcgctggcacaagtcacgcctgctccaggattccggtggcagattggtaggcgtgcctgcctcacattttgtgggtgttgaggaggtacaggctttcctgcagacctattcccaggaagtctccctcaccgccgactcgcggaagagtcacctgatctttccccagcccaactacgcagacatgctcatcagtcaggagggctgtgagaaaaatgattctttgttaacatccgtagattttcatgaatataagaatgaagctgatcatggtcagcaagccccgcccaacacggactggcgtttctctcaggcccagagacccggcaccagcggctcccaaaatggcgatgacaccggcacctggcccaacaaccagtttgacacagagatgctgcaagccatgatcttggcgtccgccagtgaagctgctgatgggagctccaccctgggagggggtgccggcaccatgggattgagcgcccgctacggaccccagttcaccctgcagcacgtgcccgactaccgccagaatgtctacatcccaggcagcaatgccacactgaccaacgcagctggcaagcgggatggcaaggccccagcaggtggcaatggcaacaagaagaagtcgggcaagaaggagaagaagtaacatggaggccaggccaagagccacagggcggcctctccccaaccagcccagcttctccttacctgcacccaggcctcagagtttcagggctaacccccagaatactggtaggggccaaggccatgctccccttgggaaacagaaacaagtgcccagtcagcacctaccccttcccccccagggggttgaatatgcaaaagcagttccgctgggaacccccatccaatcaactgctgtacccatgggggtagtggggttactgtagacaccaagaaccatttgccacaccccgtttagttacagctgaactcctccatcttccaaatcaatcaggcccatccatcccatgcctccctcctccccaccccactccaacagttcctctttcccgagtaaggtggttggggtgttgaagtaccaagtaacctacaagcctcctagttctgaaaagttggaagggcatcatgacctcttggcctctcctttgattctcaatcttcccccaaagcatggtttggtgccagccccttcacctccttccagagcccaagatcaatgctcaagttttggaggacatgatcaccatccccatggtactgatgcttgctggatttagggagggcattttgctaccaagcctcttcccaacgccctggggaccagtcttctgttttgtttttcattgtttgacgtttccactgcatgccttgacttcccccacctcctcctcaaacaagagactccactgcatgttccaagacagtatggggtggtaagataaggaagggaagtgtgtggatgtggatggtgggggcatggacaaagcttgacacatcaagttatcaaggccttggaggaggctctgtatgtcctcaggggactgacaacatcctccagattccagccataaaccaataactaggctggacccttcccactacataatagggctcagcccaggcagccagctttgggctgagctaacaggaccaatggattaaactggcatttcagtccaaggaagctcgaagcaggtttaggaccaggtccccttgagaggtcagaggggcctctgtgggtgctgggtactccagaggtgccactggtggaagggtcagcggagccccagcaggaagggtgggccagccaggccattcttagtccctgggttggggaggcagggagctagggcagggaccaaatgaacagaaagtctcagcccaggatggggcttcttcaacagggcccctgccctcctgaagcctcagtccttcaccttgccaggtgccgtttctcttccgtgaaggccactgcccaggtccccagtgcgccccctagtggccatagcctggttaaagttccccagtgcctccttgtgcatagaccttcttctcccacccccttctgcccctgggtccccggccatccagcggggctgccagagaaccccagacctgcccttacagtagtgtagcgccccctccctctttcggctggtgtagaatagccagtagtgtagtgcggtgtgcttttacgtgatggcgggtgggcagcgggcggcgggctccgcgcagccgtctgtccttgatctgcccgcggcggcccgtgttgtgttttgtgctgtgtccacgcgctaaggcgaccccctcccccgtactgacttctcctataagcgcttctcttcgcatagtcacgtagctcccaccccaccctcttcctgtgtctcacgcaagttttatactctaatatttatatggctttttttcttcgacaaaaaaataataaaacgtttcttctgaaaagctg

SEQ ID NO: 34 - DNA, 4578 bp, Homo sapiens
atggggagcggcgccggggagctgggccgggctgagaggctgccagtgctctttctcttcctgctgtctttgttctgcccggcgctctgtgagcagatccgctacaggattcccgaggaaatgcccaagggctccgtagtggggaacctcgccacggacctggggttcagcgtccaggagttaccgactcgaaaactgcgcgtcagttcggagaagccttacttcaccgtgagcgcagagagcggggagttgcttgtgagcagcaggctagacagggaggagatatgcgggaagaagccagcttgtgctctggaatttgaggctgttgctgaaaatccactgaacttttatcacgtgaatgtggagatcgaggacattaatgaccacacgccaaaattcacgcaaaattcctttgagctgcaaataagtgagtctgcacagcctggcacaagatttatactagaagtagcagaagatgcagatattggcttaaactctctgcagaagtataaactctctcttaacccaagtttctcattaataattaaggagaaacaggatggtagtaaatacccggaactggcactggagaaaaccttagaccgggaacaacagagttaccatcgtttagtcctgactgccttggacggtggacatccacccctaagcggcaccactgagctccggatccaggtaaccgacgccaatgataatcccccggtattcaaccgagacgtgtacagagtcagccttcgggaaaacgtgccaccaggcaccactgtgttgcaagtgtcagccactgaccaagacgagggcatcaactcagaaattacttattccttctacagaaccgggcaaatctttagtctgaattcaaagagcggagaaattaccactcaaaagaaactggattttgaagagaccaaggaatattcaatggttgtagaagggagggatggtggtggactggttgcacaatgtacagttgaaattaatattcaagatgaaaatgacaatagcccagaagttacattccattctctacttgaaatgattctggaaaacgcggtgcctggaacactaattgctttgatcaaaatacatgaccaagattctggggaaaatggggaggttaattgtcaattacaaggcgaagtcccttttaagattatctcttcatccaaaaattcgtataagttggtaacagatggaaccctagaccgagagcaaaccccggagtacaatgtcaccatcacagccacagacaggggcaagccgcccctctcctccagcataagcgtcatcctacatatcagagacgtcaacgataacgctccggttttccaccaggcgtcctacttagtcagtgtacccgaaaacaaccctcctggggcctccatcgcgcaagtctgcgcctcggacctggacttggggttgaacggccaagtctcctactctatcatggccagcgacctagagcctctggcactggcctcttacgtgtccatgagcgcgcaaagtggggtggtgttcgcgcagcgcgcctttgactacgagcagctgcgcaccttcgaactcacactacaggcccgcgaccagggctcgcctgcgctcagcgcaaacgtgagcctgcgcgtgttggtgggcgaccgaaacgacaacgcaccgcgggtgctgtaccccgcgctgggtcccgacggctctgcgctcttcgatatggtgccgcgcgctgcagagcccggctacctggtgaccaaggtagtggccgtggacgcagactcaggacacaacgcctggctgtcctaccacgtgctgcaggctagcgagcccgggctcttcagcctggggctgcgcacaggagaggtgcgcacagcgcgtgccttgggcgacagggacgcggcccgccagcgcctgctggttgctgtgcgtgatggtggacagccgccactctccgccaccgccacgctgcacttggtctttgctgacagcttgcaggaggtgctgccggatatcactgaccgccctgtaccctctgacccccaggctgagctgcagttttacctagtggtggccttggccttgatctcagtgctcttcctcctggccgtgattctggccgttgccttgcgcctgcgacgctcctccagccctgccgcctggagctgcttccaacctggtctctgtgtcaagtctggacctgtggttccccccaactacagtcaggggactttgccttattcctacaacctatgtgttgcacatacaggaaagacggagtttaatttcctaaaatgtagtgagcaattgagttcaggacaagacatactttgtggtgattcatctggggccttatttccactttgtaattccagcgagtcgacttcccatcctgagttgcaagccccgcccaacacggactggcgtttctctcaggcccagagacccggcaccagcggctcccaaaatggcgatgacaccggcacctggcccaacaaccagtttgacacagagatgctgcaagccatgatcttggcgtccgccagtgaagctgctgatgggagctccaccctgggagggggtgccggcaccatgggattgagcgcccgctacggaccccagttcaccctgcagcacgtgcccgactaccgccagaatgtctacatcccaggcagcaatgccacactgaccaacgcagctggcaagcgggatggcaaggccccagcaggtggcaatggcaacaagaagaagtcgggcaagaaggagaagaagtaacatggaggccaggccaagagccacagggcggcctctccccaaccagcccagcttctccttacctgcacccaggcctcagagtttcagggctaacccccagaatactggtaggggccaaggccatgctccccttgggaaacagaaacaagtgcccagtcagcacctaccccttcccccccagggggttgaatatgcaaaagcagttccgctgggaacccccatccaatcaactgctgtacccatgggggtagtggggttactgtagacaccaagaaccatttgccacaccccgtttagttacagctgaactcctccatcttccaaatcaatcaggcccatccatcccatgcctccctcctccccaccccactccaacagttcctctttcccgagtaaggtggttggggtgttgaagtaccaagtaacctacaagcctcctagttctgaaaagttggaagggcatcatgacctcttggcctctcctttgattctcaatcttcccccaaagcatggtttggtgccagccccttcacctccttccagagcccaagatcaatgctcaagttttggaggacatgatcaccatccccatggtactgatgcttgctggatttagggagggcattttgctaccaagcctcttcccaacgccctggggaccagtcttctgttttgtttttcattgtttgacgtttccactgcatgccttgacttcccccacctcctcctcaaacaagagactccactgcatgttccaagacagtatggggtggtaagataaggaagggaagtgtgtggatgtggatggtgggggcatggacaaagcttgacacatcaagttatcaaggccttggaggaggctctgtatgtcctcaggggactgacaacatcctccagattccagccataaaccaataactaggctggacccttcccactacataatagggctcagcccaggcagccagctttgggctgagctaacaggaccaatggattaaactggcatttcagtccaaggaagctcgaagcaggtttaggaccaggtccccttgagaggtcagaggggcctctgtgggtgctgggtactccagaggtgccactggtggaagggtcagcggagccccagcaggaagggtgggccagccaggccattcttagtccctgggttggggaggcagggagctagggcagggaccaaatgaacagaaagtctcagcccaggatggggcttcttcaacagggcccctgccctcctgaagcctcagtccttcaccttgccaggtgccgtttctcttccgtgaaggccactgcccaggtccccagtgcgccccctagtggccatagcctggttaaagttccccagtgcctccttgtgcatagaccttcttctcccacccccttctgcccctgggtccccggccatccagcggggctgccagagaaccccagacctgcccttacagtagtgtagcgccccctccctctttcggctggtgtagaatagccagtagtgtagtgcggtgtgcttttacgtgatggcgggtgggcagcgggcggcgggctccgcgcagccgtctgtccttgatctgcccgcggcggcccgtgttgtgttttgtgctgtgtccacgcgctaaggcgaccccctcccccgtactgacttctcctataagcgcttctcttcgcatagtcacgtagctcccaccccaccctcttcctgtgtctcacgcaagttttatactctaatatttatatggctttttttcttcgacaaaaaaataataaaacgtttcttctgaaaagctg

SEQ ID NO: 35 - DNA, 4605 bp, Homo sapiens
atggcagctccaaccaaatgccagctccgcggaagattagtcctgctatgctcgctcctggggatgctatgggaggccagggccagtcagattcgctactcagtgcctgaagagacagaaaagggctatattgtgggcaacatctccaaggacctggctctggagccccgggagctggcggagcgccgagtccgcatcgtctctagaggtaggacgcagcttttctctctgaacccgcgcagcggcaccttggtcaccgcgggtaggatagaccgggaggagctctgtgctcagagcccgcggtgtctggtgaactttaaagtcctggttgaagacagagtgaaactgtacggaatagaaatagaagtaactgatattaacgacagcgccccaaagttccaggccgaaagtctggaagtaaaaattaacgaaatcgcggttcctggagcacgttatccacttccagaagctattgatccggatgttggcgtgaactccctccagagctaccagctcagccccaatcaccacttctccctgaacgtgcagactggagacaatggagccataaacccagagctggtgctggagcgcgccctggacagggaggaggcaactgcccaccacctggtcctcacggcctcggatggcggcgagccgcgtcgctccagcacagtgcgcatccatgtgacagtgttggatacaaatgataatgccccggtttttgctcaacggatttaccgagttaaagtccttgagaacgtgcccccaggcacctggctgcttactgcaacagccagcgacctggatgagggaatcaacggaaaagtggcatacaaattctggaaaattaatgaaaaacaatctctgctattccagcttaatgaaaatactggggaaatatcaacagcaaaaagtctagattatgaagaatgttcattttatgaaatggaaatacaagctgaagatggtgggggattgaaagggtggacaaaagtgctcatttcggtggaagatgtaaatgacaatagacctgaagtgaccattacatctctgtttagcccagtgagagaagacgcacctcagggaacagtaattcttcttttcaatgctcatgaccgagactccgggaagaatggtcaagttgtctgttctatccaggagaatctatcttttacattagaaaattcagaagaagattattacagattgttgacggcccaaattcttgaccgagaaaaagcctcagaatataatatcacggtgactgcaacagacagaggaactccgcccctgtccacagaaattcacatcaccctgcaagtgactgacatcaatgataatccacctgctttctctcaagcctcctactcagtctacctcccggaaaacaacgccagaggtacttccatcttctccgtgattgcctatgaccctgatagcaatgagaattctagagttatttactccttggcagaggataccatccaagggtctcctctctccacctatgtctctattaactcagacactggtgtgctgtatgctctgtgctcctttgactatgagcagtttagagatttgcaaatgcaggtgacggcaagtgacagtggaagcccaccacttagcagcaatgtgtcattgagactgtttgttttggaccagaatgacaatgccccagaaatcctgtaccctgccctccccactgatggttctactggtgtggagctggcaccccgctctgcagagcctggctacctggtgaccaaggtggtggcagtggacagagactcaggccagaatgcttggctctcctaccgcctattcaaggccagtgagccagggctcttctcggtggggctgcacacaggtgaagtgcgcacagctcgggccctgctagatagagatgcgctcaaacagagccttgtggtggctgtacaggaccatggccagccccctctctcggccactgtcacgctcacagtagccatagctgacagcatcccagacatcctggctgacctgggcagtcttcagatccctgcagacctggaggcctcagaccttaccctctacctcgttgtggctgtggcagtcgtctcctgtgtcttcctcaccttcgttatcacgctgctggccctcaggctgaggcactggcactcctcgcatctgctgcgggctaccagtgatgggttggctggtgtgcccacctcacactttgtgggtgtagatggggttcgagctttcctacagacctattctcaggagttctccctcaccgctgactcaaggaagagtcacctgatcttcccccagcccaactatgcagacacactcatcagccagcagagctgtgagaaaaatgagcctttgtgcgtctctgttgattccaagtttcctatagaagacacccctttggttccgcaagccccgcccaacacggactggcgtttctctcaggcccagagacccggcaccagcggctcccaaaatggcgatgacaccggcacctggcccaacaaccagtttgacacagagatgctgcaagccatgatcttggcgtccgccagtgaagctgctgatgggagctccaccctgggagggggtgccggcaccatgggattgagcgcccgctacggaccccagttcaccctgcagcacgtgcccgactaccgccagaatgtctacatcccaggcagcaatgccacactgaccaacgcagctggcaagcgggatggcaaggccccagcaggtggcaatggcaacaagaagaagtcgggcaagaaggagaagaagtaacatggaggccaggccaagagccacagggcggcctctccccaaccagcccagcttctccttacctgcacccaggcctcagagtttcagggctaacccccagaatactggtaggggccaaggccatgctccccttgggaaacagaaacaagtgcccagtcagcacctaccccttcccccccagggggttgaatatgcaaaagcagttccgctgggaacccccatccaatcaactgctgtacccatgggggtagtggggttactgtagacaccaagaaccatttgccacaccccgtttagttacagctgaactcctccatcttccaaatcaatcaggcccatccatcccatgcctccctcctccccaccccactccaacagttcctctttcccgagtaaggtggttggggtgttgaagtaccaagtaacctacaagcctcctagttctgaaaagttggaagggcatcatgacctcttggcctctcctttgattctcaatcttcccccaaagcatggtttggtgccagccccttcacctccttccagagcccaagatcaatgctcaagttttggaggacatgatcaccatccccatggtactgatgcttgctggatttagggagggcattttgctaccaagcctcttcccaacgccctggggaccagtcttctgttttgtttttcattgtttgacgtttccactgcatgccttgacttcccccacctcctcctcaaacaagagactccactgcatgttccaagacagtatggggtggtaagataaggaagggaagtgtgtggatgtggatggtgggggcatggacaaagcttgacacatcaagttatcaaggccttggaggaggctctgtatgtcctcaggggactgacaacatcctccagattccagccataaaccaataactaggctggacccttcccactacataatagggctcagcccaggcagccagctttgggctgagctaacaggaccaatggattaaactggcatttcagtccaaggaagctcgaagcaggtttaggaccaggtccccttgagaggtcagaggggcctctgtgggtgctgggtactccagaggtgccactggtggaagggtcagcggagccccagcaggaagggtgggccagccaggccattcttagtccctgggttggggaggcagggagctagggcagggaccaaatgaacagaaagtctcagcccaggatggggcttcttcaacagggcccctgccctcctgaagcctcagtccttcaccttgccaggtgccgtttctcttccgtgaaggccactgcccaggtccccagtgcgccccctagtggccatagcctggttaaagttccccagtgcctccttgtgcatagaccttcttctcccacccccttctgcccctgggtccccggccatccagcggggctgccagagaaccccagacctgcccttacagtagtgtagcgccccctccctctttcggctggtgtagaatagccagtagtgtagtgcggtgtgcttttacgtgatggcgggtgggcagcgggcggcgggctccgcgcagccgtctgtccttgatctgcccgcggcggcccgtgttgtgttttgtgctgtgtccacgcgctaaggcgaccccctcccccgtactgacttctcctataagcgcttctcttcgcatagtcacgtagctcccaccccaccctcttcctgtgtctcacgcaagttttatactctaatatttatatggctttttttcttcgacaaaaaaataataaaacgtttcttctgaaaagctg

SEQ ID NO: 36 - DNA, 4599 bp, Homo sapiens
atgggagggagctgcgcgcagaggcgccgggccggcccgcggcaggtgctatttcctttgctgctgcctttgttctaccccaccctgagtgagccgatccgctactcgattccggaggagctggccaagggctcggtggtggggaacctcgctaaggatctagggctcagtgtcctggatgtgtcggctcgcaagctgcgagtgagcgcggagaagctgcacttcagcgtagacgcggagagcggggacttacttgtgaagaaccgaatagaccgtgagcaaatatgcaaagagagaagaagatgtgagttgcaattggaagctgtggtggaaaatcctttaaatatttttcatgtcattgtggtgattgaggatgttaatgaccacgcccctcaatttgataaaaaggaaatacatttagaaattttcgaatctgcatccgctggtacacgactatcgcttgaccctgccacggatcctgatataaacataaactcaattaaagattataagataaactctaatccttatttttcattaatggttagagttaattccgatggtggcaaatacccagagttatctctggagaaactcctagaccgggaagaacagagatctcatagcttgatattgactgccttggacggaggggacccaccaagaagtgccaccgctcacatagaaatttctgtcaaggataccaatgataaccccccggttttcagcagagacgaatatagaattagtcttagtgaaaatctgccccctgggtcccctgtgttgcaagtgacagccactgaccaggatgagggggtcaatgctgagataaactactacttccgaagcactgcccagagcacaaaacatatgttctcattggatgagaaaacaggtatgattaagaataaccagtcatttgattttgaagatgtagaaaggtacaccatggaagtggaagcgaaggacggaggtggtctctctacccagtgtaaagtaatcatagaaatccttgatgaaaacgacaacagcccagaaataatcatcacttctctctctgatcagattttggagaattcacctccaggaatggttgttgccctcttcaaaacacgggatctggatttcggaggaaatggagaagtcaggtgtaatatagaaacagacattccattcaagatttattcttcttccaataactactacaaactggtgacagatggagccctggaccgagagcagacaccagaatacaatgtcaccatcgtagccactgacaggggcaagccgcctctttcttccagtagaagcatcaccttgtatgtcgctgacatcaacgacaacgccccagttttcgaccagacgtcctacgtggtccacgtggccgagaacaacccgccaggagcctccattgcgcaagtgagcgcctctgacccggatttggggctcaatggccacatctcctactctatagtggcgagtgacctagagcccctggcggtgtcgtcatacgtgtcagtgagcgcgcagagcggggtggtgttcgcgcagcgcgcctttgatcacgagcagctgcgcgccttcgcgctcacgctgcaggcccgcgaccacggctcgcccacgctcagcgccaacgtgagcctgcgcgtgttggtgggagaccgcaatgacaacgcaccgcgggtgctgtacccagctctgggtcctgacggctccgcgttcttcgatatggtacctcgctctgcagagcccggctacctagtgactaaggtggtagcggtggacgccgactcgggacacaacgcctggctgtcctaccacgtgctgcaggccagtgagcccggactcttcagcctggggctgcgcactggggaggtgcgcacggctcgagccttaggcgacagggacgcagcccgccagcgcctgctggtcgctgtgcgtgacggtggacagccgccactctctgccaccgccacgcttcatctggtcttcgcagacaacttgcaagagatactgccagacctcagcgaccgccctgtactctctgacccccaggctgaactgcagttttacctggtggtggccttggccttaatctcagtgctcttcctcctcgccgtgattctggccattgccttgcgcctgcgacgctctctcagccctgctacttgggactgcttccatcctggtctctgtgtcaagtctggacctgtagttccccccaactacagtgaggggactttgccttattcttataatctgtgcattgcacatacgggtacaaaagagtttaatttcctaaaatgcagtgtgcccctacattccaatgaagacatggtttgcagtgtttctcctggagccttaattccacctcatggtggggaggatttgacttcacatcctgagactctgacttcgcaagccccgcccaacacggactggcgtttctctcaggcccagagacccggcaccagcggctcccaaaatggcgatgacaccggcacctggcccaacaaccagtttgacacagagatgctgcaagccatgatcttggcgtccgccagtgaagctgctgatgggagctccaccctgggagggggtgccggcaccatgggattgagcgcccgctacggaccccagttcaccctgcagcacgtgcccgactaccgccagaatgtctacatcccaggcagcaatgccacactgaccaacgcagctggcaagcgggatggcaaggccccagcaggtggcaatggcaacaagaagaagtcgggcaagaaggagaagaagtaacatggaggccaggccaagagccacagggcggcctctccccaaccagcccagcttctccttacctgcacccaggcctcagagtttcagggctaacccccagaatactggtaggggccaaggccatgctccccttgggaaacagaaacaagtgcccagtcagcacctaccccttcccccccagggggttgaatatgcaaaagcagttccgctgggaacccccatccaatcaactgctgtacccatgggggtagtggggttactgtagacaccaagaaccatttgccacaccccgtttagttacagctgaactcctccatcttccaaatcaatcaggcccatccatcccatgcctccctcctccccaccccactccaacagttcctctttcccgagtaaggtggttggggtgttgaagtaccaagtaacctacaagcctcctagttctgaaaagttggaagggcatcatgacctcttggcctctcctttgattctcaatcttcccccaaagcatggtttggtgccagccccttcacctccttccagagcccaagatcaatgctcaagttttggaggacatgatcaccatccccatggtactgatgcttgctggatttagggagggcattttgctaccaagcctcttcccaacgccctggggaccagtcttctgttttgtttttcattgtttgacgtttccactgcatgccttgacttcccccacctcctcctcaaacaagagactccactgcatgttccaagacagtatggggtggtaagataaggaagggaagtgtgtggatgtggatggtgggggcatggacaaagcttgacacatcaagttatcaaggccttggaggaggctctgtatgtcctcaggggactgacaacatcctccagattccagccataaaccaataactaggctggacccttcccactacataatagggctcagcccaggcagccagctttgggctgagctaacaggaccaatggattaaactggcatttcagtccaaggaagctcgaagcaggtttaggaccaggtccccttgagaggtcagaggggcctctgtgggtgctgggtactccagaggtgccactggtggaagggtcagcggagccccagcaggaagggtgggccagccaggccattcttagtccctgggttggggaggcagggagctagggcagggaccaaatgaacagaaagtctcagcccaggatggggcttcttcaacagggcccctgccctcctgaagcctcagtccttcaccttgccaggtgccgtttctcttccgtgaaggccactgcccaggtccccagtgcgccccctagtggccatagcctggttaaagttccccagtgcctccttgtgcatagaccttcttctcccacccccttctgcccctgggtccccggccatccagcggggctgccagagaaccccagacctgcccttacagtagtgtagcgccccctccctctttcggctggtgtagaatagccagtagtgtagtgcggtgtgcttttacgtgatggcgggtgggcagcgggcggcgggctccgcgcagccgtctgtccttgatctgcccgcggcggcccgtgttgtgttttgtgctgtgtccacgcgctaaggcgaccccctcccccgtactgacttctcctataagcgcttctcttcgcatagtcacgtagctcccaccccaccctcttcctgtgtctcacgcaagttttatactctaatatttatatggctttttttcttcgacaaaaaaataataaaacgtttcttctgaaaagctg

SEQ ID NO: 37 - DNA, 4617 bp, Homo sapiens
atggccgctcaaaggaatcgctcaaaggaatcaaaggattgcagcgggctggtcctgctctgccttttcttcgggattccatgggaggctggagcccggcagatctcctactcaattcctgaggaattagagaaaggctctttcgtgggcaacatctccaaggacttgggtctggcgccccgggagctggcggagcgcggagtccgcatagtctccagaggtaggacgcagcttttctctctgaacccgcgcagcggcagcttgatcaccgcgggcaggatagaccgggaggagctctgcgctcagagcgcgcggtgcgtggtgagttttaatatccttgtggaagacagggtgaaactttttgggatagaaatagaagtaactgatatcaatgacaatgctccaaaattccaagcagaaaatctagacgtaaaaattaatgaaaatgtcgctgcgggaatgcgttttcctctcccggaagctattgatccggatgtgggcgtgaactccctgcagagctatcagctcagccccaataagcacttctccctaagagttcagagccgtgccaatggcgtcaagtacccggagctggtactggagcactccctagatcgcgaggaagaggccattcaccacctggtcctcaccgcctccgacgggggtgaccctctccgatctggcactgtccttgtcagtgtgactgtcttcgatgcaaatgacaacgcgccggtcttcaccttgccagaataccgagtgagtgttcctgagaatttgcctgtgggcactcagctgctgacagtcacagccaccgacagggacgaaggtgccaatggagaagtgacatattcattccgaaaattacctgacacgcaattgttgaagttccaactaaacaaatatactggagaaataaaaatatcagaaaatctagattatgaagaaaccggtttctatgaaatagaaatacaagcagaagatggaggagcatatcttgcaactgcaaaagtgttgattacagtagaagatgtaaatgacaacagtccagagctgaccatcacgtctctatttagtccagtgactgaagattcacctctgggaacagtcgtagcccttttaaatgtgcatgatttagactctgagcagaatggacaggtaacctgttccattttggcgtatctaccatttaaattagaaaagtccattgacagttattacagattggtgatacacagagcccttgacagggaacaggtatcctcttacaatatcacagtgacagccacagatgggggaagtcctcctctatcaacggaagctcactttatgctacaagtggcagatatcaatgacaacccacctaccttctctcaagtctcctactttacctatatcccagagaacaacgccaggggtgcctccatcttctcagtgacagcgctggacccggacagcaaagagaatgcccagattatttactccctggctgaagacaccatccagggggtacctctgtcctcatacatatccatcaactcagacactggcgtcctgtatgcactcagatccttcgactatgagcagtttcatgagctacagatgcaggtgacagccagcgacagcggggatcctccactcagcagcaacgtgtcgttgagcctgtttgtgctggaccagaacgacaatgcgcccgagatcctgtaccccgccctccccacagacggttccacaggcgtggagctggcgccccgctccgcagagcccggctacctggtgaccaaggtggtggcggtggacagagactccggccagaacgcctggctgtcctaccgtctgctcaaggccagcgagccgggactcttcgcggtgggggagcacacgggcgaggtgcgcacggcgcgagccctgctggacagagacgcgctcaagcaaagcctcgtagtggccgtccaggaccacggccagccccctctctccgccactgtcacgctcaccgtggccgtggccgacagcatcccccaagtcctggcggacctcggcagcttcgagtctccagctaactctgaaacctcagacctcactctgtacctggtggtagcggtggccgcggtctcctgcgtcttcctggccttcgtcatcgtgctgctggcgcacaggctgcggcgctggcacaagtcacgcctgctgcaggcttcaggaggcggcttgacaggtgtgtccggctcgcactttgtgggcgtggacggggttcgggctttcctgcagacctattcccacgaggtctctctcaccgcggactcgcgaaagagtcacctgatcttcccccagcccaattatgcggacacgctcatcagccaggagagctgtgagaaaaacgatcctttgtctttgttagatgattcgaagtttcctatagaggataccccattggttccacaagccccgcccaacacggactggcgtttctctcaggcccagagacccggcaccagcggctcccaaaatggcgatgacaccggcacctggcccaacaaccagtttgacacagagatgctgcaagccatgatcttggcgtccgccagtgaagctgctgatgggagctccaccctgggagggggtgccggcaccatgggattgagcgcccgctacggaccccagttcaccctgcagcacgtgcccgactaccgccagaatgtctacatcccaggcagcaatgccacactgaccaacgcagctggcaagcgggatggcaaggccccagcaggtggcaatggcaacaagaagaagtcgggcaagaaggagaagaagtaacatggaggccaggccaagagccacagggcggcctctccccaaccagcccagcttctccttacctgcacccaggcctcagagtttcagggctaacccccagaatactggtaggggccaaggccatgctccccttgggaaacagaaacaagtgcccagtcagcacctaccccttcccccccagggggttgaatatgcaaaagcagttccgctgggaacccccatccaatcaactgctgtacccatgggggtagtggggttactgtagacaccaagaaccatttgccacaccccgtttagttacagctgaactcctccatcttccaaatcaatcaggcccatccatcccatgcctccctcctccccaccccactccaacagttcctctttcccgagtaaggtggttggggtgttgaagtaccaagtaacctacaagcctcctagttctgaaaagttggaagggcatcatgacctcttggcctctcctttgattctcaatcttcccccaaagcatggtttggtgccagccccttcacctccttccagagcccaagatcaatgctcaagttttggaggacatgatcaccatccccatggtactgatgcttgctggatttagggagggcattttgctaccaagcctcttcccaacgccctggggaccagtcttctgttttgtttttcattgtttgacgtttccactgcatgccttgacttcccccacctcctcctcaaacaagagactccactgcatgttccaagacagtatggggtggtaagataaggaagggaagtgtgtggatgtggatggtgggggcatggacaaagcttgacacatcaagttatcaaggccttggaggaggctctgtatgtcctcaggggactgacaacatcctccagattccagccataaaccaataactaggctggacccttcccactacataatagggctcagcccaggcagccagctttgggctgagctaacaggaccaatggattaaactggcatttcagtccaaggaagctcgaagcaggtttaggaccaggtccccttgagaggtcagaggggcctctgtgggtgctgggtactccagaggtgccactggtggaagggtcagcggagccccagcaggaagggtgggccagccaggccattcttagtccctgggttggggaggcagggagctagggcagggaccaaatgaacagaaagtctcagcccaggatggggcttcttcaacagggcccctgccctcctgaagcctcagtccttcaccttgccaggtgccgtttctcttccgtgaaggccactgcccaggtccccagtgcgccccctagtggccatagcctggttaaagttccccagtgcctccttgtgcatagaccttcttctcccacccccttctgcccctgggtccccggccatccagcggggctgccagagaaccccagacctgcccttacagtagtgtagcgccccctccctctttcggctggtgtagaatagccagtagtgtagtgcggtgtgcttttacgtgatggcgggtgggcagcgggcggcgggctccgcgcagccgtctgtccttgatctgcccgcggcggcccgtgttgtgttttgtgctgtgtccacgcgctaaggcgaccccctcccccgtactgacttctcctataagcgcttctcttcgcatagtcacgtagctcccaccccaccctcttcctgtgtctcacgcaagttttatactctaatatttatatggctttttttcttcgacaaaaaaataataaaacgtttcttctgaaaagctg

SEQ ID NO: 38 - DNA, 4872 bp, Homo sapiens
agaatgggctctaggcgccgctgctcaccaatcagggaatgggaagctgcgcgccattgagtccctccctcccccgcctctaccacacaaagcggaatgagatggatactcacagatcctgacactggagacttagaagtattttccttcgctttctgatatattttggatgtagtcggcctaggacttcatagatacataagccgattcacaaccaaccagctcgagaaaccgcggaatatcggcttagagcctgccatggcgaatcggctacagcgcggggaccgcagtcggctgctgctgctgctgtgcattttcctggggacgctgcgggggttccgggccaggcagatccgatattcggtgccagaagagaccgaaaagggctccttcgtgggcaatatctccaaggacctggggctggagccccgggagctggcgaagcgcggagtccgcatcgtctccagagggaagacacagcttttcgctgtgaatccgcgaagcggcagcttgatcacggcaggcaggatagaccgggaggagctctgtgagacggtgtcctcctgttttttaaatatggaacttctcgtggaagacaccttgaagatttacggagtggaggtggaaataatagatattaatgataacgcccccagcttccaggaggacgaagtggagataaaagtcagtgagcacgcaattcctggggcgcgatttgctcttcctaatgctagggatccagatgtgggcgtgaactccctccagagctaccagctcagccctaataattacttttccttgcaactgcggggcagaacggatggggccaagaatccagagctagtactggagggaagcctggaccgagagaaagaggctgctcacctgctcctcctcacagctttagatggaggcgatcccatccgaaagggcgcagttcccattcgtgtggtggtcctcgatgtaaatgatcacatcccaatgtttacacagtccgtatatcgcgtgagtgttccagaaaacatcagctccggaactcgggtgctgatggttaatgcaacggatccagacgagggaatcaacggggaagtaatgtattcatttcggaacatggaaagcaaggcttctgaaatattccaattggattcacaaactggagaagttcaagtacgggggtctctggattttgaaaaatatagattctatgagatggaaattcaaggccaagatggtggaggtctctttaccaccacgacgatgttgatcactgttgtggatgtgaatgataacgctccagaaataactatcacctcttctattaattcaattctggaaaactctcctccaggtacagtgattgctcttctaaatgtgcaagatcaagattctggagaaaatggtcaagtctcctgttttattcctaaccacctgccttttaaattagaaaagacttatggaaattattacaaattgataacaagcagagtgctggacagggagttggtccagagctacaatataacgttgacagccacagaccagggaagcccgcctttgtctgcagaaactcatgtctggctgaatgtggcagatgacaacgataaccctcccgtttttcctcactcctcttactctgcctacattcccgaaaacaaccccaggggtgcctccatcttctcagtgaccgccctcgacccggacagcaaacagaatgccctggtcacttactctctgacggatgacactgtccagggggtgcctctgtcctcctatgtctctattaactccaacactggtgttctctatgccctacaatccttcgactatgagcagtttcgagacttagaactgagagtgatagcacgtgacagcggggacccgcccctcagcagcaacgtgtcgctgagcctgttcgtgctggaccagaacgacaatgcgcccgagatcctgtaccctgccctccccacagacggctccactggcgtggagctggcgccccgctctgcggaacctggctacctggtgaccaaggtggttgcggtggacaaagattcaggccagaacgcctggctgtcctatcgcctgcttaaggccagcgagccgggactcttcgcggtgggggagcacacgggcgaggtgcgtacagcgcgggcactgctggacagagacgcgctcaagcagagcctcgtggtggccgtccaggaccacggccagccccctctctcggccaccgtcacgctcaccgtggctgtggccgacagcatccccgaagtcctggcggacctcggcagcctcgagtctctggctaactctgaaacctcagacctctcgctgtacttggtggtggcggtggccgcagtctcctgcatcttcctggtctttgtcatcgtgctgctggcactcaggctgtggcgctggcataagtcacgcctgctgcaggcttctgaaggcgggttggcaggtatgcccacgtcacattttgtaggcgtggacggggtacaggctttcctgcaaacctattcccacgaggtctctctcattgcggactcgcagaagagtcacctgattttcccccagcccaactatggggacacgctcatcagccaggagagctgtgagaaaagcgagccactcttgatagctgaagactcagctatcattttaggcaaatgtgacccgacaagtaatcagcaagccccgcccaacacggactggcgtttctctcaggcccagagacccggcaccagcggctcccaaaatggcgatgacaccggcacctggcccaacaaccagtttgacacagagatgctgcaagccatgatcttggcgtccgccagtgaagctgctgatgggagctccaccctgggagggggtgccggcaccatgggattgagcgcccgctacggaccccagttcaccctgcagcacgtgcccgactaccgccagaatgtctacatcccaggcagcaatgccacactgaccaacgcagctggcaagcgggatggcaaggccccagcaggtggcaatggcaacaagaagaagtcgggcaagaaggagaagaagtaacatggaggccaggccaagagccacagggcggcctctccccaaccagcccagcttctccttacctgcacccaggcctcagagtttcagggctaacccccagaatactggtaggggccaaggccatgctccccttgggaaacagaaacaagtgcccagtcagcacctaccccttcccccccagggggttgaatatgcaaaagcagttccgctgggaacccccatccaatcaactgctgtacccatgggggtagtggggttactgtagacaccaagaaccatttgccacaccccgtttagttacagctgaactcctccatcttccaaatcaatcaggcccatccatcccatgcctccctcctccccaccccactccaacagttcctctttcccgagtaaggtggttggggtgttgaagtaccaagtaacctacaagcctcctagttctgaaaagttggaagggcatcatgacctcttggcctctcctttgattctcaatcttcccccaaagcatggtttggtgccagccccttcacctccttccagagcccaagatcaatgctcaagttttggaggacatgatcaccatccccatggtactgatgcttgctggatttagggagggcattttgctaccaagcctcttcccaacgccctggggaccagtcttctgttttgtttttcattgtttgacgtttccactgcatgccttgacttcccccacctcctcctcaaacaagagactccactgcatgttccaagacagtatggggtggtaagataaggaagggaagtgtgtggatgtggatggtgggggcatggacaaagcttgacacatcaagttatcaaggccttggaggaggctctgtatgtcctcaggggactgacaacatcctccagattccagccataaaccaataactaggctggacccttcccactacataatagggctcagcccaggcagccagctttgggctgagctaacaggaccaatggattaaactggcatttcagtccaaggaagctcgaagcaggtttaggaccaggtccccttgagaggtcagaggggcctctgtgggtgctgggtactccagaggtgccactggtggaagggtcagcggagccccagcaggaagggtgggccagccaggccattcttagtccctgggttggggaggcagggagctagggcagggaccaaatgaacagaaagtctcagcccaggatggggcttcttcaacagggcccctgccctcctgaagcctcagtccttcaccttgccaggtgccgtttctcttccgtgaaggccactgcccaggtccccagtgcgccccctagtggccatagcctggttaaagttccccagtgcctccttgtgcatagaccttcttctcccacccccttctgcccctgggtccccggccatccagcggggctgccagagaaccccagacctgcccttacagtagtgtagcgccccctccctctttcggctggtgtagaatagccagtagtgtagtgcggtgtgcttttacgtgatggcgggtgggcagcgggcggcgggctccgcgcagccgtctgtccttgatctgcccgcggcggcccgtgttgtgttttgtgctgtgtccacgcgctaaggcgaccccctcccccgtactgacttctcctataagcgcttctcttcgcatagtcacgtagctcccaccccaccctcttcctgtgtctcacgcaagttttatactctaatatttatatggctttttttcttcgacaaaaaaataataaaacgtttcttctgaaaagctg

SEQ ID NO: 39 - DNA, 4317 bp, Homo sapiens
agaatgggctctaggcgccgctgctcaccaatcagggaatgggaagctgcgcgccattgagtccctccctcccccgcctctaccacacaaagcggaatgagatggatactcacagatcctgacactggagacttagaagtattttccttcgctttctgatatattttggatgtagtcggcctaggacttcatagatacataagccgattcacaaccaaccagctcgagaaaccgcggaatatcggcttagagcctgccatggcgaatcggctacagcgcggggaccgcagtcggctgctgctgctgctgtgcattttcctggggacgctgcgggggttccgggccaggcagatccgatattcggtgccagaagagaccgaaaagggctccttcgtgggcaatatctccaaggacctggggctggagccccgggagctggcgaagcgcggagtccgcatcgtctccagagggaagacacagcttttcgctgtgaatccgcgaagcggcagcttgatcacggcaggcaggatagaccgggaggagctctgtgagacggtgtcctcctgttttttaaatatggaacttctcgtggaagacaccttgaagatttacggagtggaggtggaaataatagatattaatgataacgcccccagcttccaggaggacgaagtggagataaaagtcagtgagcacgcaattcctggggcgcgatttgctcttcctaatgctagggatccagatgtgggcgtgaactccctccagagctaccagctcagccctaataattacttttccttgcaactgcggggcagaacggatggggccaagaatccagagctagtactggagggaagcctggaccgagagaaagaggctgctcacctgctcctcctcacagctttagatggaggcgatcccatccgaaagggcgcagttcccattcgtgtggtggtcctcgatgtaaatgatcacatcccaatgtttacacagtccgtatatcgcgtgagtgttccagaaaacatcagctccggaactcgggtgctgatggttaatgcaacggatccagacgagggaatcaacggggaagtaatgtattcatttcggaacatggaaagcaaggcttctgaaatattccaattggattcacaaactggagaagttcaagtacgggggtctctggattttgaaaaatatagattctatgagatggaaattcaaggccaagatggtggaggtctctttaccaccacgacgatgttgatcactgttgtggatgtgaatgataacgctccagaaataactatcacctcttctattaattcaattctggaaaactctcctccaggtacagtgattgctcttctaaatgtgcaagatcaagattctggagaaaatggtcaagtctcctgttttattcctaaccacctgccttttaaattagaaaagacttatggaaattattacaaattgataacaagcagagtgctggacagggagttggtccagagctacaatataacgttgacagccacagaccagggaagcccgcctttgtctgcagaaactcatgtctggctgaatgtggcagatgacaacgataaccctcccgtttttcctcactcctcttactctgcctacattcccgaaaacaaccccaggggtgcctccatcttctcagtgaccgccctcgacccggacagcaaacagaatgccctggtcacttactctctgacggatgacactgtccagggggtgcctctgtcctcctatgtctctattaactccaacactggtgttctctatgccctacaatccttcgactatgagcagtttcgagacttagaactgagagtgatagcacgtgacagcggggacccgcccctcagcagcaacgtgtcgctgagcctgttcgtgctggaccagaacgacaatgcgcccgagatcctgtaccctgccctccccacagacggctccactggcgtggagctggcgccccgctctgcggaacctggctacctggtgaccaaggtggttgcggtggacaaagattcaggccagaacgcctggctgtcctatcgcctgcttaaggccagcgagccgggactcttcgcggtgggggagcacacgggcgagcaagccccgcccaacacggactggcgtttctctcaggcccagagacccggcaccagcggctcccaaaatggcgatgacaccggcacctggcccaacaaccagtttgacacagagatgctgcaagccatgatcttggcgtccgccagtgaagctgctgatgggagctccaccctgggagggggtgccggcaccatgggattgagcgcccgctacggaccccagttcaccctgcagcacgtgcccgactaccgccagaatgtctacatcccaggcagcaatgccacactgaccaacgcagctggcaagcgggatggcaaggccccagcaggtggcaatggcaacaagaagaagtcgggcaagaaggagaagaagtaacatggaggccaggccaagagccacagggcggcctctccccaaccagcccagcttctccttacctgcacccaggcctcagagtttcagggctaacccccagaatactggtaggggccaaggccatgctccccttgggaaacagaaacaagtgcccagtcagcacctaccccttcccccccagggggttgaatatgcaaaagcagttccgctgggaacccccatccaatcaactgctgtacccatgggggtagtggggttactgtagacaccaagaaccatttgccacaccccgtttagttacagctgaactcctccatcttccaaatcaatcaggcccatccatcccatgcctccctcctccccaccccactccaacagttcctctttcccgagtaaggtggttggggtgttgaagtaccaagtaacctacaagcctcctagttctgaaaagttggaagggcatcatgacctcttggcctctcctttgattctcaatcttcccccaaagcatggtttggtgccagccccttcacctccttccagagcccaagatcaatgctcaagttttggaggacatgatcaccatccccatggtactgatgcttgctggatttagggagggcattttgctaccaagcctcttcccaacgccctggggaccagtcttctgttttgtttttcattgtttgacgtttccactgcatgccttgacttcccccacctcctcctcaaacaagagactccactgcatgttccaagacagtatggggtggtaagataaggaagggaagtgtgtggatgtggatggtgggggcatggacaaagcttgacacatcaagttatcaaggccttggaggaggctctgtatgtcctcaggggactgacaacatcctccagattccagccataaaccaataactaggctggacccttcccactacataatagggctcagcccaggcagccagctttgggctgagctaacaggaccaatggattaaactggcatttcagtccaaggaagctcgaagcaggtttaggaccaggtccccttgagaggtcagaggggcctctgtgggtgctgggtactccagaggtgccactggtggaagggtcagcggagccccagcaggaagggtgggccagccaggccattcttagtccctgggttggggaggcagggagctagggcagggaccaaatgaacagaaagtctcagcccaggatggggcttcttcaacagggcccctgccctcctgaagcctcagtccttcaccttgccaggtgccgtttctcttccgtgaaggccactgcccaggtccccagtgcgccccctagtggccatagcctggttaaagttccccagtgcctccttgtgcatagaccttcttctcccacccccttctgcccctgggtccccggccatccagcggggctgccagagaaccccagacctgcccttacagtagtgtagcgccccctccctctttcggctggtgtagaatagccagtagtgtagtgcggtgtgcttttacgtgatggcgggtgggcagcgggcggcgggctccgcgcagccgtctgtccttgatctgcccgcggcggcccgtgttgtgttttgtgctgtgtccacgcgctaaggcgaccccctcccccgtactgacttctcctataagcgcttctcttcgcatagtcacgtagctcccaccccaccctcttcctgtgtctcacgcaagttttatactctaatatttatatggctttttttcttcgacaaaaaaataataaaacgtttcttctgaaaagctg

SEQ ID NO: 40 - DNA, 3301 bp, Homo sapiens
gtgcctcttgcagcagcctaacccagaagcaggggggaatcctgaatcgagctgagagggcttccccggttctcctgggaaccccatcggccccctgccagcacacacctgagcagcatcacaggacatggccccctcagccacctagctggggcccatctaggagtggcatcttttttggtgccctgaaggccagctctggaccttcccaggaaaagtgccagctcacagaactgcttgaccaaaggaccggctcttgagacatcccccaacccacctggcccccagctagggtgggggctccaggagactgagattagcctgccctctttggacagcagctccaggacagggcgggtgggctgaccacccaaaccccatctgggcccaggccccatgccccgaggaggggtggtctgaagcccaccagagccccctgccagactgtctgcctcccttctgactgtggccgcttggcatggccagcaacagcagctcctgcccgacacctgggggcgggcacctcaatgggtacccggtgcctccctacgccttcttcttcccccctatgctgggtggactctccccgccaggcgctctgaccactctccagcaccagcttccagttagtggatatagcacaccatccccagccaccattgagacccagagcagcagttctgaagagatagtgcccagccctccctcgccaccccctctaccccgcatctacaagccttgctttgtctgtcaggacaagtcctcaggctaccactatggggtcagcgcctgtgagggctgcaagggcttcttccgccgcagcatccagaagaacatggtgtacacgtgtcaccgggacaagaactgcatcatcaacaaggtgacccggaaccgctgccagtactgccgactgcagaagtgctttgaagtgggcatgtccaaggagtctgtgagaaacgaccgaaacaagaagaagaaggaggtgcccaagcccgagtgctctgagagctacacgctgacgccggaggtgggggagctcattgagaaggtgcgcaaagcgcaccaggaaaccttccctgccctctgccagctgggcaaatacactacgaacaacagctcagaacaacgtgtctctctggacattgacctctgggacaagttcagtgaactctccaccaagtgcatcattaagactgtggagttcgccaagcagctgcccggcttcaccaccctcaccatcgccgaccagatcaccctcctcaaggctgcctgcctggacatcctgatcctgcggatctgcacgcggtacacgcccgagcaggacaccatgaccttctcggacgggctgaccctgaaccggacccagatgcacaacgctggcttcggccccctcaccgacctggtctttgccttcgccaaccagctgctgcccctggagatggatgatgcggagacggggctgctcagcgccatctgcctcatctgcggagaccgccaggacctggagcagccggaccgggtggacatgctgcaggagccgctgctggaggcgctaaaggtctacgtgcggaagcggaggcccagccgcccccacatgttccccaagatgctaatgaagattactgacctgcgaagcatcagcgccaagggggctgagcgggtgatcacgctgaagatggagatcccgggctccatgccgcctctcatccaggaaatgttggagaactcagagggcctggacactctgagcggacagccggggggtggggggcgggacgggggtggcctggcccccccgccaggcagctgtagccccagcctcagccccagctccaacagaagcagcccggccacccactccccgtgaccgcccacgccacatggacacagccctcgccctccgccccggcttttctctgcctttctaccgaccatgtgaccccgcaccagccctgcccccacctgccctcccgggcagtactggggaccttccctgggggacggggagggaggaggcagcgactccttggacagaggcctgggccctcagtggactgcctgctcccacagcctgggctgacgtcagaggccgaggccaggaactgagtgaggcccctggtcctgggtctcaggatgggtcctgggggcctcgtgttcatcaagacacccctctgcccagctcaccacatcttcatcaccagcaaacgccaggacttggctcccccatcctcagaactcacaagccattgctccccagctggggaacctcaacctcccccctgcctcggttggtgacagagggggtgggacaggggcggggggttccccctgtacataccctgccataccaaccccaggtattaattctcgctggttttgtttttattttaatttttttgttttgatttttttaataagaattttcattttaagcacatttatactgaaggaatttgtgctgtgtattggggggagctggatccagagctggagggggtgggtccgggggagggagtggctcggaaggggcccccactctcctttcatgtccctgtgccccccagttctcctcctcagccttttcctcctcagttttctctttaaaactgtgaagtactaactttccaaggcctgccttcccctccctcccactggagaagccgccagcccctttctccctctgcctgaccactgggtgtggacggtgtggggcagccctgaaaggacaggctcctggccttggcacttgcctgcacccaccatgaggcatggagcagggcagagcaagggccccgggacagagttttcccagacctggctcctcggcagagctgcctcccgtcagggcccacatcatctaggctccccagcccccactgtgaaggggctggccaggggcccgagctgcccccacccccggcctcagccaccagcacccccatagggcccccagacaccacacacatgcgcgtgcgcacacacacaaacacacacacactggacagtagatgggccgacacacacttggcccgagttcctccatttccctggcctgccccccacccccaacctgtcccacccccgtgccccctccttaccccgcaggacgggcctacaggggggtctcccctcacccctgcacccccagctgggggagctggctctgccccgacctccttcaccaggggttggggccccttcccctggagcccgtgggtgcacctgttactgttgggctttccactgagatctactggataaagaataaagttctatttattctaaaaaaaaaaaaaaaaaa

SEQ ID NO: 41 - DNA, 3413 bp, Homo sapiens
ctgctccgtaccctccgccccttcagtctggggctccgggtaaagtttcagcctccgcacgtgactcgctatggccgctgccatcgccccgcgcccctgagccgcggccccctggacggctcctctcccgggaccccgcaccctgatgccgagcagcaccagggcgccgggttagggcagacgctgtgctcgctggcaccccgaacgggttgcttcccccgctgcgagcatcacaggacatggccccctcagccacctagctggggcccatctaggagtggcatcttttttggtgccctgaaggccagctctggaccttcccaggaaaagtgccagctcacagaactgcttgaccaaaggaccggctcttgagacatcccccaacccacctggcccccagctagggtgggggctccaggagactgagattagcctgccctctttggacagcagctccaggacagggcgggtgggctgaccacccaaaccccatctgggcccaggccccatgccccgaggaggggtggtctgaagcccaccagagccccctgccagactgtctgcctcccttctgactgtggccgcttggcatggccagcaacagcagctcctgcccgacacctgggggcgggcacctcaatgggtacccggtgcctccctacgccttcttcttcccccctatgctgggtggactctccccgccaggcgctctgaccactctccagcaccagcttccagttagtggatatagcacaccatccccagccaccattgagacccagagcagcagttctgaagagatagtgcccagccctccctcgccaccccctctaccccgcatctacaagccttgctttgtctgtcaggacaagtcctcaggctaccactatggggtcagcgcctgtgagggctgcaagggcttcttccgccgcagcatccagaagaacatggtgtacacgtgtcaccgggacaagaactgcatcatcaacaaggtgacccggaaccgctgccagtactgccgactgcagaagtgctttgaagtgggcatgtccaaggagtctgtgagaaacgaccgaaacaagaagaagaaggaggtgcccaagcccgagtgctctgagagctacacgctgacgccggaggtgggggagctcattgagaaggtgcgcaaagcgcaccaggaaaccttccctgccctctgccagctgggcaaatacactacgaacaacagctcagaacaacgtgtctctctggacattgacctctgggacaagttcagtgaactctccaccaagtgcatcattaagactgtggagttcgccaagcagctgcccggcttcaccaccctcaccatcgccgaccagatcaccctcctcaaggctgcctgcctggacatcctgatcctgcggatctgcacgcggtacacgcccgagcaggacaccatgaccttctcggacgggctgaccctgaaccggacccagatgcacaacgctggcttcggccccctcaccgacctggtctttgccttcgccaaccagctgctgcccctggagatggatgatgcggagacggggctgctcagcgccatctgcctcatctgcggagaccgccaggacctggagcagccggaccgggtggacatgctgcaggagccgctgctggaggcgctaaaggtctacgtgcggaagcggaggcccagccgcccccacatgttccccaagatgctaatgaagattactgacctgcgaagcatcagcgccaagggggctgagcgggtgatcacgctgaagatggagatcccgggctccatgccgcctctcatccaggaaatgttggagaactcagagggcctggacactctgagcggacagccggggggtggggggcgggacgggggtggcctggcccccccgccaggcagctgtagccccagcctcagccccagctccaacagaagcagcccggccacccactccccgtgaccgcccacgccacatggacacagccctcgccctccgccccggcttttctctgcctttctaccgaccatgtgaccccgcaccagccctgcccccacctgccctcccgggcagtactggggaccttccctgggggacggggagggaggaggcagcgactccttggacagaggcctgggccctcagtggactgcctgctcccacagcctgggctgacgtcagaggccgaggccaggaactgagtgaggcccctggtcctgggtctcaggatgggtcctgggggcctcgtgttcatcaagacacccctctgcccagctcaccacatcttcatcaccagcaaacgccaggacttggctcccccatcctcagaactcacaagccattgctccccagctggggaacctcaacctcccccctgcctcggttggtgacagagggggtgggacaggggcggggggttccccctgtacataccctgccataccaaccccaggtattaattctcgctggttttgtttttattttaatttttttgttttgatttttttaataagaattttcattttaagcacatttatactgaaggaatttgtgctgtgtattggggggagctggatccagagctggagggggtgggtccgggggagggagtggctcggaaggggcccccactctcctttcatgtccctgtgccccccagttctcctcctcagccttttcctcctcagttttctctttaaaactgtgaagtactaactttccaaggcctgccttcccctccctcccactggagaagccgccagcccctttctccctctgcctgaccactgggtgtggacggtgtggggcagccctgaaaggacaggctcctggccttggcacttgcctgcacccaccatgaggcatggagcagggcagagcaagggccccgggacagagttttcccagacctggctcctcggcagagctgcctcccgtcagggcccacatcatctaggctccccagcccccactgtgaaggggctggccaggggcccgagctgcccccacccccggcctcagccaccagcacccccatagggcccccagacaccacacacatgcgcgtgcgcacacacacaaacacacacacactggacagtagatgggccgacacacacttggcccgagttcctccatttccctggcctgccccccacccccaacctgtcccacccccgtgccccctccttaccccgcaggacgggcctacaggggggtctcccctcacccctgcacccccagctgggggagctggctctgccccgacctccttcaccaggggttggggccccttcccctggagcccgtgggtgcacctgttactgttgggctttccactgagatctactggataaagaataaagttctatttattctaaaaaaaaaaaaaaaaaa

SEQ ID NO: 42 - DNA, 3122 bp, Homo sapiens
ctgctccgtaccctccgccccttcagtctggggctccgggtaaagtttcagcctccgcacgtgactcgctatggccgctgccatcgccccgcgcccctgagccgcggccccctggacggctcctctcccgggaccccgcaccctgatgccgagcagcaccagggcgccgggttagggcagacgctgtgctcgctggcaccccgaacgggttgcttcccccgctgcgagcatcacaggacatggccccctcagccacctagctggggcccatctaggagtggcatcttttttggtgccctgaaggccagctctggaccttcccaggaaaagtgccagctcacagaactgcttgaccaaaggaccggctcttgagacatcccccaacccacctggcccccagctagggtgggggctccaggagactgagattagcctgccctctttggacagcagctccaggacagggcgggtgggctgaccacccaaaccccatctgggcccaggccccatgccccgaggaggggtggtctgaagcccaccagagccccctgccagactgtctgcctcccttctgactgtggccgcttggcatggccagcaacagcagctcctgcccgacacctgggggcgggcacctcaatgggtacccggtgcctccctacgccttcttcttcccccctatgctgggtggactctccccgccaggcgctctgaccactctccagcaccagcttccagttagtggatatagcacaccatccccagccactgtgagaaacgaccgaaacaagaagaagaaggaggtgcccaagcccgagtgctctgagagctacacgctgacgccggaggtgggggagctcattgagaaggtgcgcaaagcgcaccaggaaaccttccctgccctctgccagctgggcaaatacactacgaacaacagctcagaacaacgtgtctctctggacattgacctctgggacaagttcagtgaactctccaccaagtgcatcattaagactgtggagttcgccaagcagctgcccggcttcaccaccctcaccatcgccgaccagatcaccctcctcaaggctgcctgcctggacatcctgatcctgcggatctgcacgcggtacacgcccgagcaggacaccatgaccttctcggacgggctgaccctgaaccggacccagatgcacaacgctggcttcggccccctcaccgacctggtctttgccttcgccaaccagctgctgcccctggagatggatgatgcggagacggggctgctcagcgccatctgcctcatctgcggagaccgccaggacctggagcagccggaccgggtggacatgctgcaggagccgctgctggaggcgctaaaggtctacgtgcggaagcggaggcccagccgcccccacatgttccccaagatgctaatgaagattactgacctgcgaagcatcagcgccaagggggctgagcgggtgatcacgctgaagatggagatcccgggctccatgccgcctctcatccaggaaatgttggagaactcagagggcctggacactctgagcggacagccggggggtggggggcgggacgggggtggcctggcccccccgccaggcagctgtagccccagcctcagccccagctccaacagaagcagcccggccacccactccccgtgaccgcccacgccacatggacacagccctcgccctccgccccggcttttctctgcctttctaccgaccatgtgaccccgcaccagccctgcccccacctgccctcccgggcagtactggggaccttccctgggggacggggagggaggaggcagcgactccttggacagaggcctgggccctcagtggactgcctgctcccacagcctgggctgacgtcagaggccgaggccaggaactgagtgaggcccctggtcctgggtctcaggatgggtcctgggggcctcgtgttcatcaagacacccctctgcccagctcaccacatcttcatcaccagcaaacgccaggacttggctcccccatcctcagaactcacaagccattgctccccagctggggaacctcaacctcccccctgcctcggttggtgacagagggggtgggacaggggcggggggttccccctgtacataccctgccataccaaccccaggtattaattctcgctggttttgtttttattttaatttttttgttttgatttttttaataagaattttcattttaagcacatttatactgaaggaatttgtgctgtgtattggggggagctggatccagagctggagggggtgggtccgggggagggagtggctcggaaggggcccccactctcctttcatgtccctgtgccccccagttctcctcctcagccttttcctcctcagttttctctttaaaactgtgaagtactaactttccaaggcctgccttcccctccctcccactggagaagccgccagcccctttctccctctgcctgaccactgggtgtggacggtgtggggcagccctgaaaggacaggctcctggccttggcacttgcctgcacccaccatgaggcatggagcagggcagagcaagggccccgggacagagttttcccagacctggctcctcggcagagctgcctcccgtcagggcccacatcatctaggctccccagcccccactgtgaaggggctggccaggggcccgagctgcccccacccccggcctcagccaccagcacccccatagggcccccagacaccacacacatgcgcgtgcgcacacacacaaacacacacacactggacagtagatgggccgacacacacttggcccgagttcctccatttccctggcctgccccccacccccaacctgtcccacccccgtgccccctccttaccccgcaggacgggcctacaggggggtctcccctcacccctgcacccccagctgggggagctggctctgccccgacctccttcaccaggggttggggccccttcccctggagcccgtgggtgcacctgttactgttgggctttccactgagatctactggataaagaataaagttctatttattctaaaaaaaaaaaaaaaaaa

SEQ ID NO: 43 - DNA, 3494 bp, Homo sapiens
ctcggttccctgcgtttctcccgctgcagccggacgcgccgggaatgggttaagccaggggcggtgcctggacggggcggggcggtggaaagggggtggtgcccggaggggagggggcgcgcagagctggggtgggggggccgtggcgcgtaccaccagagaccgagcgagtcgccagctgcccctggcctggcgggggcggaaccgcgcgggatccccacccccacccggaatcctcgccacggagaatccctggagaagccccggatccccggctgggaggaggaagtgctcgttgacccccagccccgcgctgatcccgcccccggcctgcggacttggggagccgctgtactctgcctcggacgccacgagactctagacgggagtcccctcgaggtgaagccgctgagttcccgggccccgccaggcttccctgggagagccgacggaccccccctcccagcacacacaacttccctgcttttcaccgggactggcggagcggccggcggacttagacgcggggacttcagggcagggggcgccccctgcccgggtcaccagtcggggcgaggggacgtctcctctcccccagctgctctgctcggatggcgccgccggctgagtgacgggggcggcgcgcaggacttcccagctcggacctcttgccttcgaggggaaagatgtacgagagtgtagaagtggggggtcccacccctaatcccttcctagtggtggatttttataaccagaaccgggcctgtttgctcccagagaaggggctccccgccccgggtccgtactccaccccgctccggactccgctttggaatggctcaaaccactccattgagacccagagcagcagttctgaagagatagtgcccagccctccctcgccaccccctctaccccgcatctacaagccttgctttgtctgtcaggacaagtcctcaggctaccactatggggtcagcgcctgtgagggctgcaagggcttcttccgccgcagcatccagaagaacatggtgtacacgtgtcaccgggacaagaactgcatcatcaacaaggtgacccggaaccgctgccagtactgccgactgcagaagtgctttgaagtgggcatgtccaaggagtctgtgagaaacgaccgaaacaagaagaagaaggaggtgcccaagcccgagtgctctgagagctacacgctgacgccggaggtgggggagctcattgagaaggtgcgcaaagcgcaccaggaaaccttccctgccctctgccagctgggcaaatacactacgaacaacagctcagaacaacgtgtctctctggacattgacctctgggacaagttcagtgaactctccaccaagtgcatcattaagactgtggagttcgccaagcagctgcccggcttcaccaccctcaccatcgccgaccagatcaccctcctcaaggctgcctgcctggacatcctgatcctgcggatctgcacgcggtacacgcccgagcaggacaccatgaccttctcggacgggctgaccctgaaccggacccagatgcacaacgctggcttcggccccctcaccgacctggtctttgccttcgccaaccagctgctgcccctggagatggatgatgcggagacggggctgctcagcgccatctgcctcatctgcggagaccgccaggacctggagcagccggaccgggtggacatgctgcaggagccgctgctggaggcgctaaaggtctacgtgcggaagcggaggcccagccgcccccacatgttccccaagatgctaatgaagattactgacctgcgaagcatcagcgccaagggggctgagcgggtgatcacgctgaagatggagatcccgggctccatgccgcctctcatccaggaaatgttggagaactcagagggcctggacactctgagcggacagccggggggtggggggcgggacgggggtggcctggcccccccgccaggcagctgtagccccagcctcagccccagctccaacagaagcagcccggccacccactccccgtgaccgcccacgccacatggacacagccctcgccctccgccccggcttttctctgcctttctaccgaccatgtgaccccgcaccagccctgcccccacctgccctcccgggcagtactggggaccttccctgggggacggggagggaggaggcagcgactccttggacagaggcctgggccctcagtggactgcctgctcccacagcctgggctgacgtcagaggccgaggccaggaactgagtgaggcccctggtcctgggtctcaggatgggtcctgggggcctcgtgttcatcaagacacccctctgcccagctcaccacatcttcatcaccagcaaacgccaggacttggctcccccatcctcagaactcacaagccattgctccccagctggggaacctcaacctcccccctgcctcggttggtgacagagggggtgggacaggggcggggggttccccctgtacataccctgccataccaaccccaggtattaattctcgctggttttgtttttattttaatttttttgttttgatttttttaataagaattttcattttaagcacatttatactgaaggaatttgtgctgtgtattggggggagctggatccagagctggagggggtgggtccgggggagggagtggctcggaaggggcccccactctcctttcatgtccctgtgccccccagttctcctcctcagccttttcctcctcagttttctctttaaaactgtgaagtactaactttccaaggcctgccttcccctccctcccactggagaagccgccagcccctttctccctctgcctgaccactgggtgtggacggtgtggggcagccctgaaaggacaggctcctggccttggcacttgcctgcacccaccatgaggcatggagcagggcagagcaagggccccgggacagagttttcccagacctggctcctcggcagagctgcctcccgtcagggcccacatcatctaggctccccagcccccactgtgaaggggctggccaggggcccgagctgcccccacccccggcctcagccaccagcacccccatagggcccccagacaccacacacatgcgcgtgcgcacacacacaaacacacacacactggacagtagatgggccgacacacacttggcccgagttcctccatttccctggcctgccccccacccccaacctgtcccacccccgtgccccctccttaccccgcaggacgggcctacaggggggtctcccctcacccctgcacccccagctgggggagctggctctgccccgacctccttcaccaggggttggggccccttcccctggagcccgtgggtgcacctgttactgttgggctttccactgagatctactggataaagaataaagttctatttattctaaaaaaaaaaaaaaaaaa

SEQ ID NO: 44 - DNA, 5138 bp, Homo sapiens
gatccgcagaggagcccacttgagagcgcctcctgtcgtctgtaaggttgccttgccatccctcggcaccccaacttcccccgcccccccatcgcctcctcctccatcctccagttcaaaatggcgacggcggcggcagcggcggcggtgatggctcctccgggctgcccgggttcgtgccccaacttcgccgtagtctgctccttcttggagcgctacgggccgctgctagacctgcctgagttgccgttccctgagctggagcgggtgctgcaggcgccgccgccggacgtcggcaacggagaagtaccaaaagaattggtggagctccatttgaagctgatgaggaaaattggcaaatctgttactgcagacagatgggaaaaatatttgatcaagatatgccaagagtttaacagtacctgggcatgggagatggagaagaagggctatcttgaaatgagtgttgaatgcaaactagcactcttaaagtacctctgtgagtgtcagtttgatgacaatctcaaattcaagaatattattaatgaggaggatgccgatactatgcgtctccagccaattggtcgagacaaagatggcctcatgtactggtaccaattggatcaagatcacaatgtcagaatgtacatagaagaacaagatgatcaagatggctcttcatggaaatgcattgtcagaaatcgaaacgagttggctgagactcttgcactcctgaaagcacaaattgatcctgtactattgaaaaactctagccaacaagacaactcttctcgggaaagtcccagcttagaggatgaggagactaaaaaagaggaagaaacacctaaacaagaggaacagaaagaaagtgaaaagatgaaaagtgaggagcagcctatggatttagaaaaccgttctacagccaatgttctagaagagactactgtgaaaaaagaaaaagaagatgaaaaggaacttgtgaaactgccagtcatagtgaagctagaaaaacctttgccagaaaatgaagaaaaaaagattatcaaagaagaaagtgattccttcaaggaaaatgtcaaacccattaaagttgaggtgaaggaatgtagagcagatcctaaagataccaaaagtagcatggagaagccagtggcacaggagcctgaaaggatcgaatttggtggcaatattaaatcttctcacgaaattactgagaaatctactgaagaaactgagaaacttaaaaatgaccagcaggccaagataccactaaaaaaacgagaaattaaactgagtgatgattttgacagtccagtcaagggacctttgtgtaaatcagttactccaacaaaagagtttttgaaagatgaaataaaacaagaggaagagacttgtaaaaggatctctacaatcactgctttgggtcatgaagggaaacagctggtaaatggagaagttagtgatgaaagggtagctccaaattttaagacagaaccaatagagacaaagttttatgagacaaaggaagagagctatagcccctctaaggacagaaatatcatcacggagggaaatggaacagagtccttaaattctgtcataacaagtatgaaaacaggtgagcttgagaaagaaacagcccctttgaggaaagatgcagatagttcaatatcagtcttagagatccatagtcaaaaagcacaaatagaggaacccgatcctccagaaatggaaacttctcttgattcttctgagatggcaaaagatctctcttcaaaaactgctttatcttccaccgagtcgtgtaccatgaaaggtgaagagaagtctcccaaaactaagaaggataagcgcccaccaatcctagaatgtcttgaaaagttagagaagtccaaaaagacttttcttgataaggacgcacaaagattgagtccaataccagaagaagttccaaagagtactctagagtcagaaaagcctggctctcctgaggcagctgaaacttctccaccatctaatatcattgaccactgtgagaaactagcctcagaaaaagaagtggtagaatgccagagtacaagtactgttggtggccagtctgtgaaaaaagtagacctagaaaccctaaaagaggattctgagttcacaaaggtagaaatggataatctggacaatgcccagacctctggcatagaggagccttctgagacaaagggttctatgcaaaaaagcaaattcaaatataagttggttcctgaagaagaaaccactgcctcagaaaatacagagataacctctgaaaggcagaaagagggcatcaaattaacaatcaggatatcaagtcggaaaaagaagcccgattctccccccaaagttctagaaccagaaaacaagcaagagaagacagaaaaggaagaggagaaaacaaatgtgggtcgtactttaagaagatctccaagaatatctagacccactgcaaaagtggctgagatcagagatcagaaagctgataaaaaaagaggggaaggagaagatgaggtggaagaagagtcaacagctttgcaaaaaactgacaaaaaggaaattttgaaaaaatcagagaaagatacaaattctaaagtaagcaaggtaaaacccaaaggcaaagttcgatggactggttctcggacacgtggcagatggaaatattccagcaatgatgaaagtgaagggtctggcagtgaaaaatcatctgcagcttcagaagaggaggaagaaaaggaaagtgaagaagccatcctagcagatgatgatgaaccatgcaaaaaatgtggccttccaaaccatcctgagctaattcttctgtgtgactcttgcgatagtggataccatactgcctgccttcgccctcctctgatgatcatcccagatggagaatggttctgcccaccttgccaacataaactgctctgtgaaaaattagaggaacagttgcaggatttggatgttgccttaaagaagaaagagcgtgccgaacgaagaaaagaacgcttggtgtatgttggtatcagtattgaaaacatcattcctccacaagagccagacttttctgaagatcaagaagaaaagaaaaaagattcaaaaaaatccaaagcaaacttgcttgaaaggaggtcaacaagaacaaggaaatgtataagctacagatttgatgagtttgatgaagcaattgatgaagctattgaagatgacatcaaagaagccgatggaggaggagttggccgaggaaaagatatctccaccatcacaggtcatcgtgggaaagacatctctactattttggatgaagaaagaaaagaaaataaacgaccccagagggcagctgctgctcgaaggaagaaacgccggcgattaaatgatctggacagtgatagcaacctggatgaagaagagagcgaggatgaattcaagatcagtgatggatctcaagatgagtttgttgtgtctgatgaaaacccagatgaaagtgaagaagatccgccatctaatgatgacagtgacactgacttttgtagccgtagactgaggcgacacccctctcggccaatgaggcagagcaggcgtttgcgaagaaagaccccaaagaaaaaatattccgatgatgatgaagaggaggaatctgaggagaatagtagagactctgaaagtgacttcagtgatgattttagtgatgattttgtagaaactcggcgaaggcggtcaaggagaaatcagaaaagacaaattaactacaaagaagactcagaaagtgacggttcccagaagagtttgcgacgtggtaaagaaataaggcgagtacacaagcgaagactttccagctcagagagtgaagagagctatttgtccaagaactctgaagatgatgagctagctaaagaatcaaagcggtcagttcgaaagcggggccgaagcacagacgagtattcagaagcagatgaggaggaggaggaagaggaaggcaaaccatcccgcaaacggctacaccggattgagacggatgaggaggagagttgtgacaatgctcatggagatgcaaatcagcctgcccgtgacagccagcctagggtcctgccctcagaacaagagagcaccaagaagccctaccggatagaaagtgatgaggaagaggactttgaaaatgtaggcaaagtggggagcccattggactatagcttagtggacttaccttcaaccaatggacagagccctggcaaagccattgagaacttgattggcaagcctactgagaagtctcagacccccaaggacaacagcacagccagtgcaagcctagcctccaatgggacaagtggtgggcaggaggcaggagcaccagaagaggaggaagatgagcttttgagagtgactgaccttgttgattatgtctgtaacagtgaacagttataagactttttttccatttttgtgctaatttattccacggtagctctcacaccagcgggccagttattaaaagctgtttaatttttcctagaaaactccactacagaatgacttttagaagaaaaatttcaacaaatcctgaagtctttctgtgaagtgaccagttctgaactttgaagataaataattgctgtaaattccttttgattttctttttccaggttcatggtccttggtaatttcattcatggaaaaaaatcttattataataacaacaaagatttgtatatttttgactttatatttcctgagctctcctgactttgtgaaaaagggtggatgaaaatgcattccgaatctgtgagggcccaaaacagaatttaggggtgggtgaaagcacttgtgctttagctttttcatattaaatatatattatatttaaacattcatggcatagatgatgatttacagacaatttaaaagttcaagtctgtactgttacagtttgagaattgtagataacatcatacataagtcatttagtaacagcctttgtgaaatgaacttgtttactattggagataaccacacttaataaagaagagacagtgaaagtaccatcataattaacctaaatttttgttatagcagagtttcttgtttaaaaaaaaataaaatcatctgaaaagcaaaaa

SEQ ID NO: 45 - DNA, 4690 bp, Homo sapiens
gctggccgtctgcgcaccctctctcccctcggctctttcctaggaaagctgagcctcatagcttccgggagaaggttttccggaagaaacctccagtctgtgcagtatgtaaggtgaccatcgatgggacaggcgtttcgtgcagagtctgcaaggtggcgacgcacagaaaatgtgaagcaaaggtgacttcagcctgtcaggccttgcctcccgtggagttgcggcgaaacacggccccagtcaggcgcatagagcacctgggatccaccaaatctctgaaccactcaaagcagcgcagcactctgcccaggagcttcagcctggacccgctcatggagcggcgctgggacttagacctcacctacgtgacggagcgcatcttggccgccgccttccccgcgcggcccgatgaacagcggcaccggggccacctgcgcgagctggcccatgtgctgcaatccaagcaccgggacaagtacctgctcttcaacctttcagagaaaaggcatgacctgacccgcttaaaccccaaggttcaagacttcggctggcctgagctgcatgctccacccctggacaagctgtgctccatctgcaaagccatggagacatggctcagtgctgacccacagcacgtggtcgtactatactgcaagggaaacaagggcaagcttggggtcatcgtttctgcctacatgcactacagcaagatctctgcaggggcggaccaggcactggccactcttaccatgcggaaattctgcgaggacaaggtggccacagaactgcagccctcccagcgtcgatatatcagctacttcagtgggctgctatctggctccatcagaatgaacagcagccctctcttcctgcactatgtgctcatccccatgctgccagcctttgaacctggcacaggcttccagcccttccttaaaatctaccagtccatgcagcttgtctacacatctggagtctatcacattgcaggccctggtccccagcagctttgcatcagcctggagccagccctcctcctcaaaggcgatgtcatggtaacatgttatcacaagggtggccggggcacagaccggaccctcgtgttccgagtccagttccacacctgcaccatccacggaccacagctcactttccccaaggaccagcttgacgaggcctggactgatgagaggttccccttccaagcctccgtggagtttgtcttctcctccagccccgagaagatcaaaggcagcactccacggaacgacccctcggtctctgtcgactacaacaccactgagccagccgtgcgctgggactcctatgagaacttcaaccagcaccacgaggacagtgtggatggctccttgacccacacccggggtcccctggatggcagtccttatgcccaggtgcagcggcctccccggcagacccccccggcaccctctccagagcctccaccaccccccatgctctctgtcagcagcgactcaggccattcctccacgctgaccacagagccggctgctgagtcccctggccggccgccccctacagctgctgaacggcaggagctggatcgcctcctaggaggctgcggagtggccagtgggggccggggagctgggcgcgagacggccatcctagatgacgaagagcagcccactgtgggcggaggcccccacctcggagtgtatccaggccataggcctggcctcagccgccactgctcctgccgccagggctaccgggagccctgcggggttcccaatgggggctactaccggccagagggaaccctggagaggaggcgactggcctacgggggctatgagggatccccccagggctacgccgaggcctcgatggagaagaggcgcctctgccgatcgctgtcagaggggctatacccctacccacctgagatggggaaaccagccactggggactttggctaccgcgccccaggctaccgggaggtggtcatcctggaggaccctgggctgcctgccctatacccatgcccagcctgcgaggagaagctggcgctgcctacagcagccttgtatggactgcggctggagagggaggctggagaagggtgggcaagtgaggctggcaagcctctcctgcacccagtgcggcctgggcacccgctgcctctgctcttgcctgcctgtgggcatcaccatgccccgatgcctgactacagctgcctgaagccacccaaggcaggcgaggaagggcacgagggctgctcctacaccatgtgccccgaaggcaggtatgggcatccagggtaccctgccctggtgacatacagctatggaggagcagttcccagttactgcccagcatatggccgtgtgcctcatagctgtggctctccaggagagggcagagggtatcccagccctggtgcccactccccacgggctggctccatttccccgggcagcccgccctatccacaatctaggaagctgagctacgagatccctacggaggagggaggggacaggtacccattgcctgggcacctggcctcagcaggacctttggcatctgcagagtcgctggagccggtgtcctggagggagggccccagtgggcacagcacactgcctcggtctccccgagatgccccatgcagtgcttcgtcagagttgtctggtccctccacgcccctgcacaccagcagtccagtccagggcaaggaaagcacccggcgacaggacaccaggtcccccacctcagcgcccactcagagactgagtcctggcgaggccttgccccctgtttcccaggcaggcaccggaaaggcccctgagctgccgtcgggaagtgggcctgagcctctggcccctagcccagtctctccgaccttccctcccagctcgcccagtgactggcctcaggaaaggagtccagggggccactcagatggcgccagtcctcggagccctgtgcccaccacacttcctggcctccgccacgccccctggcaaggccctcgaggcccccccgacagcccagatgggtctcccctcactcctgtgccttcccagatgccctggcttgtggccagcccagagccgcctcagagctcacctacacctgctttccccctggctgcctcctatgacaccaatggccttagccagcccccacttcctgagaaacgccacctgcccgggccggggcaacagccaggaccctggggcccagagcaggcatcatcgccagccagaggcatcagtcaccatgtcaccttcgcacctctgctctcagataatgtcccccaaaccccagagcctcctacacaagagagccaaagcaatgtcaagtttgtccaggatacatccaagttctggtacaagccacacctgtcccgtgaccaagccattgccctgctgaaggacaaggaccctggggccttcctgatcagggacagtcattcattccaaggagcttatgggctggccctcaaggtggccacaccgccacccagtgcccagccctggaaaggggaccccgtggaacagctggtccgccatttcctcatcgagactgggcccaaaggggtgaagatcaagggctgccccagtgagccctactttggcagcctgtccgccttggtctcccagcactccatctcccccatctccctgccctgctgcctgcgcattcccagcaaagatcctctggaagagaccccagaggctccagtgcccaccaacatgagcacagcggcagacctcctgcgtcagggtgctgcctgcagcgtgctctacttgacctcagtggagacagagtcactgacgggcccccaagctgtggcccgggccagctctgcagctctgagctgtagcccccgcccgacaccagctgttgtccacttcaaggtgtcagcccagggcattacactgacggacaaccaaaggaagctcttctttcgccgccattatccagtgaacagcatcaccttctccagcactgaccctcaagaccggagatggaccaacccagacgggaccacctccaagatctttggtttcgtggccaagaagccgggaagcccctgggagaatgtgtgtcacctctttgcagagcttgacccagatcagcctgctggcgccattgtcaccttcatcaccaaagttctactgggccagagaaaatgaaggaaggccacaagctcagagcccacatcaacactgcccccctcccagcaccccacagccctcacatcccctggcctggacccaggagacccaggagaaagcaccctcccttaggaatgaggagtgggcatcaggcctgggacactgctctccttccccgcccccagcctgctaagttaagtggacaggcccacaagatgaccttgcatgtgagcagatggcagagatgggtgtgtgaggggtgaggaggcatcagcagttgagccccgaaggagatcaggcagccccacctgcaggagaacgtcagccctccaggggatcagcccctgccagttccacccagctgcaggtgccagcacggcagggatgggagaggggtggggagcgagtcactgcctcctctgagcagagattcagagtaggatcacatgaataggggaaaaaagagagtctatttttgtctaataataaagaatttctataaactttagccgaaa

SEQ ID NO: 46 - DNA, 4952 bp, Homo sapiens
gcacattctttcaagtgacagctatagcctgtcccaggggctgctgtccacagcttggggctgaagactcccaggccattaaccccttagcttttaggaagattactccccctttttcaaggccccatccacctccctcccttgactcccaggacgggaagttggccatgttcccaggagggaggccggaggcccatggatgggggtggagtatgtgttgggaggggggacctcctgtccagtcctcaggccctgggacagctgctgaggaaggagagcagacccaggagagccatgaagcctaggaaagctgagcctcatagcttccgggagaaggttttccggaagaaacctccagtctgtgcagtatgtaaggtgaccatcgatgggacaggcgtttcgtgcagagtctgcaaggtggcgacgcacagaaaatgtgaagcaaaggtgacttcagcctgtcaggccttgcctcccgtggagttgcggcgaaacacggccccagtcaggcgcatagagcacctgggatccaccaaatctctgaaccactcaaagcagcgcagcactctgcccaggagcttcagcctggacccgctcatggagcggcgctgggacttagacctcacctacgtgacggagcgcatcttggccgccgccttccccgcgcggcccgatgaacagcggcaccggggccacctgcgcgagctggcccatgtgctgcaatccaagcaccgggacaagtacctgctcttcaacctttcagagaaaaggcatgacctgacccgcttaaaccccaaggttcaagacttcggctggcctgagctgcatgctccacccctggacaagctgtgctccatctgcaaagccatggagacatggctcagtgctgacccacagcacgtggtcgtactatactgcaagggaaacaagggcaagcttggggtcatcgtttctgcctacatgcactacagcaagatctctgcaggggcggaccaggcactggccactcttaccatgcggaaattctgcgaggacaaggtggccacagaactgcagccctcccagcgtcgatatatcagctacttcagtgggctgctatctggctccatcagaatgaacagcagccctctcttcctgcactatgtgctcatccccatgctgccagcctttgaacctggcacaggcttccagcccttccttaaaatctaccagtccatgcagcttgtctacacatctggagtctatcacattgcaggccctggtccccagcagctttgcatcagcctggagccagccctcctcctcaaaggcgatgtcatggtaacatgttatcacaagggtggccggggcacagaccggaccctcgtgttccgagtccagttccacacctgcaccatccacggaccacagctcactttccccaaggaccagcttgacgaggcctggactgatgagaggttccccttccaagcctccgtggagtttgtcttctcctccagccccgagaagatcaaaggcagcactccacggaacgacccctcggtctctgtcgactacaacaccactgagccagccgtgcgctgggactcctatgagaacttcaaccagcaccacgaggacagtgtggatggctccttgacccacacccggggtcccctggatggcagtccttatgcccaggtgcagcggcctccccggcagacccccccggcaccctctccagagcctccaccaccccccatgctctctgtcagcagcgactcaggccattcctccacgctgaccacagagccggctgctgagtcccctggccggccgccccctacagctgctgaacggcaggagctggatcgcctcctaggaggctgcggagtggccagtgggggccggggagctgggcgcgagacggccatcctagatgacgaagagcagcccactgtgggcggaggcccccacctcggagtgtatccaggccataggcctggcctcagccgccactgctcctgccgccagggctaccgggagccctgcggggttcccaatgggggctactaccggccagagggaaccctggagaggaggcgactggcctacgggggctatgagggatccccccagggctacgccgaggcctcgatggagaagaggcgcctctgccgatcgctgtcagaggggctatacccctacccacctgagatggggaaaccagccactggggactttggctaccgcgccccaggctaccgggaggtggtcatcctggaggaccctgggctgcctgccctatacccatgcccagcctgcgaggagaagctggcgctgcctacagcagccttgtatggactgcggctggagagggaggctggagaagggtgggcaagtgaggctggcaagcctctcctgcacccagtgcggcctgggcacccgctgcctctgctcttgcctgcctgtgggcatcaccatgccccgatgcctgactacagctgcctgaagccacccaaggcaggcgaggaagggcacgagggctgctcctacaccatgtgccccgaaggcaggtatgggcatccagggtaccctgccctggtgacatacagctatggaggagcagttcccagttactgcccagcatatggccgtgtgcctcatagctgtggctctccaggagagggcagagggtatcccagccctggtgcccactccccacgggctggctccatttccccgggcagcccgccctatccacaatctaggaagctgagctacgagatccctacggaggagggaggggacaggtacccattgcctgggcacctggcctcagcaggacctttggcatctgcagagtcgctggagccggtgtcctggagggagggccccagtgggcacagcacactgcctcggtctccccgagatgccccatgcagtgcttcgtcagagttgtctggtccctccacgcccctgcacaccagcagtccagtccagggcaaggaaagcacccggcgacaggacaccaggtcccccacctcagcgcccactcagagactgagtcctggcgaggccttgccccctgtttcccaggcaggcaccggaaaggcccctgagctgccgtcgggaagtgggcctgagcctctggcccctagcccagtctctccgaccttccctcccagctcgcccagtgactggcctcaggaaaggagtccagggggccactcagatggcgccagtcctcggagccctgtgcccaccacacttcctggcctccgccacgccccctggcaaggccctcgaggcccccccgacagcccagatgggtctcccctcactcctgtgccttcccagatgccctggcttgtggccagcccagagccgcctcagagctcacctacacctgctttccccctggctgcctcctatgacaccaatggccttagccagcccccacttcctgagaaacgccacctgcccgggccggggcaacagccaggaccctggggcccagagcaggcatcatcgccagccagaggcatcagtcaccatgtcaccttcgcacctctgctctcagataatgtcccccaaaccccagagcctcctacacaagagagccaaagcaatgtcaagtttgtccaggatacatccaagttctggtacaagccacacctgtcccgtgaccaagccattgccctgctgaaggacaaggaccctggggccttcctgatcagggacagtcattcattccaaggagcttatgggctggccctcaaggtggccacaccgccacccagtgcccagccctggaaaggggaccccgtggaacagctggtccgccatttcctcatcgagactgggcccaaaggggtgaagatcaagggctgccccagtgagccctactttggcagcctgtccgccttggtctcccagcactccatctcccccatctccctgccctgctgcctgcgcattcccagcaaagatcctctggaagagaccccagaggctccagtgcccaccaacatgagcacagcggcagacctcctgcgtcagggtgctgcctgcagcgtgctctacttgacctcagtggagacagagtcactgacgggcccccaagctgtggcccgggccagctctgcagctctgagctgtagcccccgcccgacaccagctgttgtccacttcaaggtgtcagcccagggcattacactgacggacaaccaaaggaagctcttctttcgccgccattatccagtgaacagcatcaccttctccagcactgaccctcaagaccggagatggaccaacccagacgggaccacctccaagatctttggtttcgtggccaagaagccgggaagcccctgggagaatgtgtgtcacctctttgcagagcttgacccagatcagcctgctggcgccattgtcaccttcatcaccaaagttctactgggccagagaaaatgaaggaaggccacaagctcagagcccacatcaacactgcccccctcccagcaccccacagccctcacatcccctggcctggacccaggagacccaggagaaagcaccctcccttaggaatgaggagtgggcatcaggcctgggacactgctctccttccccgcccccagcctgctaagttaagtggacaggcccacaagatgaccttgcatgtgagcagatggcagagatgggtgtgtgaggggtgaggaggcatcagcagttgagccccgaaggagatcaggcagccccacctgcaggagaacgtcagccctccaggggatcagcccctgccagttccacccagctgcaggtgccagcacggcagggatgggagaggggtggggagcgagtcactgcctcctctgagcagagattcagagtaggatcacatgaataggggaaaaaagagagtctatttttgtctaataataaagaatttctataaactttagccgaaa

SEQ ID NO: 47 - DNA, 4862 bp, Homo sapiens
tcctcacaccagccagacagcctaccctccgcccaggggaagcggctgcctccgccaggccgcttccaggaagccccgggccaggccccagcattgttcaggccctggggccagcaccccagccagccgaacaccatgaagtccagcggccctgtggagaggctgctcagagccctggggaggagggacagcagccgggccgcaagcaggcctaggaaagctgagcctcatagcttccgggagaaggttttccggaagaaacctccagtctgtgcagtatgtaaggtgaccatcgatgggacaggcgtttcgtgcagagtctgcaaggtggcgacgcacagaaaatgtgaagcaaaggtgacttcagcctgtcaggccttgcctcccgtggagttgcggcgaaacacggccccagtcaggcgcatagagcacctgggatccaccaaatctctgaaccactcaaagcagcgcagcactctgcccaggagcttcagcctggacccgctcatggagcggcgctgggacttagacctcacctacgtgacggagcgcatcttggccgccgccttccccgcgcggcccgatgaacagcggcaccggggccacctgcgcgagctggcccatgtgctgcaatccaagcaccgggacaagtacctgctcttcaacctttcagagaaaaggcatgacctgacccgcttaaaccccaaggttcaagacttcggctggcctgagctgcatgctccacccctggacaagctgtgctccatctgcaaagccatggagacatggctcagtgctgacccacagcacgtggtcgtactatactgcaagggaaacaagggcaagcttggggtcatcgtttctgcctacatgcactacagcaagatctctgcaggggcggaccaggcactggccactcttaccatgcggaaattctgcgaggacaaggtggccacagaactgcagccctcccagcgtcgatatatcagctacttcagtgggctgctatctggctccatcagaatgaacagcagccctctcttcctgcactatgtgctcatccccatgctgccagcctttgaacctggcacaggcttccagcccttccttaaaatctaccagtccatgcagcttgtctacacatctggagtctatcacattgcaggccctggtccccagcagctttgcatcagcctggagccagccctcctcctcaaaggcgatgtcatggtaacatgttatcacaagggtggccggggcacagaccggaccctcgtgttccgagtccagttccacacctgcaccatccacggaccacagctcactttccccaaggaccagcttgacgaggcctggactgatgagaggttccccttccaagcctccgtggagtttgtcttctcctccagccccgagaagatcaaaggcagcactccacggaacgacccctcggtctctgtcgactacaacaccactgagccagccgtgcgctgggactcctatgagaacttcaaccagcaccacgaggacagtgtggatggctccttgacccacacccggggtcccctggatggcagtccttatgcccaggtgcagcggcctccccggcagacccccccggcaccctctccagagcctccaccaccccccatgctctctgtcagcagcgactcaggccattcctccacgctgaccacagagccggctgctgagtcccctggccggccgccccctacagctgctgaacggcaggagctggatcgcctcctaggaggctgcggagtggccagtgggggccggggagctgggcgcgagacggccatcctagatgacgaagagcagcccactgtgggcggaggcccccacctcggagtgtatccaggccataggcctggcctcagccgccactgctcctgccgccagggctaccgggagccctgcggggttcccaatgggggctactaccggccagagggaaccctggagaggaggcgactggcctacgggggctatgagggatccccccagggctacgccgaggcctcgatggagaagaggcgcctctgccgatcgctgtcagaggggctatacccctacccacctgagatggggaaaccagccactggggactttggctaccgcgccccaggctaccgggaggtggtcatcctggaggaccctgggctgcctgccctatacccatgcccagcctgcgaggagaagctggcgctgcctacagcagccttgtatggactgcggctggagagggaggctggagaagggtgggcaagtgaggctggcaagcctctcctgcacccagtgcggcctgggcacccgctgcctctgctcttgcctgcctgtgggcatcaccatgccccgatgcctgactacagctgcctgaagccacccaaggcaggcgaggaagggcacgagggctgctcctacaccatgtgccccgaaggcaggtatgggcatccagggtaccctgccctggtgacatacagctatggaggagcagttcccagttactgcccagcatatggccgtgtgcctcatagctgtggctctccaggagagggcagagggtatcccagccctggtgcccactccccacgggctggctccatttccccgggcagcccgccctatccacaatctaggaagctgagctacgagatccctacggaggagggaggggacaggtacccattgcctgggcacctggcctcagcaggacctttggcatctgcagagtcgctggagccggtgtcctggagggagggccccagtgggcacagcacactgcctcggtctccccgagatgccccatgcagtgcttcgtcagagttgtctggtccctccacgcccctgcacaccagcagtccagtccagggcaaggaaagcacccggcgacaggacaccaggtcccccacctcagcgcccactcagagactgagtcctggcgaggccttgccccctgtttcccaggcaggcaccggaaaggcccctgagctgccgtcgggaagtgggcctgagcctctggcccctagcccagtctctccgaccttccctcccagctcgcccagtgactggcctcaggaaaggagtccagggggccactcagatggcgccagtcctcggagccctgtgcccaccacacttcctggcctccgccacgccccctggcaaggccctcgaggcccccccgacagcccagatgggtctcccctcactcctgtgccttcccagatgccctggcttgtggccagcccagagccgcctcagagctcacctacacctgctttccccctggctgcctcctatgacaccaatggccttagccagcccccacttcctgagaaacgccacctgcccgggccggggcaacagccaggaccctggggcccagagcaggcatcatcgccagccagaggcatcagtcaccatgtcaccttcgcacctctgctctcagataatgtcccccaaaccccagagcctcctacacaagagagccaaagcaatgtcaagtttgtccaggatacatccaagttctggtacaagccacacctgtcccgtgaccaagccattgccctgctgaaggacaaggaccctggggccttcctgatcagggacagtcattcattccaaggagcttatgggctggccctcaaggtggccacaccgccacccagtgcccagccctggaaaggggaccccgtggaacagctggtccgccatttcctcatcgagactgggcccaaaggggtgaagatcaagggctgccccagtgagccctactttggcagcctgtccgccttggtctcccagcactccatctcccccatctccctgccctgctgcctgcgcattcccagcaaagatcctctggaagagaccccagaggctccagtgcccaccaacatgagcacagcggcagacctcctgcgtcagggtgctgcctgcagcgtgctctacttgacctcagtggagacagagtcactgacgggcccccaagctgtggcccgggccagctctgcagctctgagctgtagcccccgcccgacaccagctgttgtccacttcaaggtgtcagcccagggcattacactgacggacaaccaaaggaagctcttctttcgccgccattatccagtgaacagcatcaccttctccagcactgaccctcaagaccggagatggaccaacccagacgggaccacctccaagatctttggtttcgtggccaagaagccgggaagcccctgggagaatgtgtgtcacctctttgcagagcttgacccagatcagcctgctggcgccattgtcaccttcatcaccaaagttctactgggccagagaaaatgaaggaaggccacaagctcagagcccacatcaacactgcccccctcccagcaccccacagccctcacatcccctggcctggacccaggagacccaggagaaagcaccctcccttaggaatgaggagtgggcatcaggcctgggacactgctctccttccccgcccccagcctgctaagttaagtggacaggcccacaagatgaccttgcatgtgagcagatggcagagatgggtgtgtgaggggtgaggaggcatcagcagttgagccccgaaggagatcaggcagccccacctgcaggagaacgtcagccctccaggggatcagcccctgccagttccacccagctgcaggtgccagcacggcagggatgggagaggggtggggagcgagtcactgcctcctctgagcagagattcagagtaggatcacatgaataggggaaaaaagagagtctatttttgtctaataataaagaatttctataaactttagccgaaa

SEQ ID NO: 48 - DNA, 6527 bp, Homo sapiens
gctgggagagtggctctcctttggcttccccaattgtgtgggggctgccattgacccggtgtcgccgcagaaccgaggtcgccgagtgatgatgttgtgaagtcgcccgcctgtccctgccacgcccgggcggttgctggcagtgggagcagcggcagcagcttcggctgctgctttcaggctgccgctgcattaggggcttcctgaggaagcgcgggcggacgacagaggatgccgaaccactccagtcatgactgtccaaagtatgataatcacatgagagtgctcgttgctacggatgtcatttgactcatcagagaaaatctgtctaaaagaaaatatccatgtgaccaaatccatttcattattgaatggcttgatggatttcctttactctgattcataccaaagctgtccttctcaaccaaagcaagaaaggatcctgcatgagtcaatcccagaatgcaatttttacatcaccaacaggtgaagaaaacctcatgaatagcaatcacagagactcggagagcatcactgatgtctgctccaatgaggatctccctgaagttgagctggtgagtctgctagaagaacaactaccacagtataggctaaaagtagacactctctttctatatgaaaatcaagactggactcagtctccacaccagcggcagcatgcatctgatgctctctctccagtccttgctgaagagactttccgttacatgattctaggcacagacagggtggagcagatgaccaaaacttacaatgacatcgacatggttacacatctcctggcagagagggatcgtgatctggaactcgctgctcgaattggacaagctctcttaaagcggaaccatgtcttatctgagcagaacgaatccctggaggagcaattgggacaagcctttgatcaagttaatcagctgcagcatgagctatgcaagaaagatgagttacttcgaatcgtctccattgcttctgaagaaagtgaaactgattccagctgttctacacctcttcggttcaatgagtcctttagcttatctcaagggttgctgcagttggaaatgctgcaagaaaagctcaaggaactggaagaagagaatatggctcttcgatccaaggcttgtcacataaagacagaaactgttacctatgaagaaaaggaacaacagcttgtcagcgactgtgttaaagaacttcgtgaaacaaatgctcagatgtccagaatgactgaagaattgtcagggaagagtgatgagctgattcgataccaagaagagctttcctctcttttgtcacagattgtagaccttcagcacaaacttaaagaacatgtgattgagaaggaagaactaaaacttcacctgcaagcttccaaagatgcccaacggcaactgacaatggagctgcacgagttacaagacaggaatatggagtgtctaggaatgttacatgaatcccaagaagaaataaaggaacttcgtagtagatctggccctactgctcatctctacttctcccaatcatatggagcttttactggggaatctttggcagctgagattgaggggactatgcgtaaaaagctgagtttggatgaggaatcttctctctttaaacaaaaagcccaacagaagcgggtatttgataccgtcaggattgccaatgacacacggggccgctctatctcattcccagctctgttacccattccaggctccaaccgttcaagtgtcatcatgacagcaaaaccttttgagtctggtcttcagcaaacagaggacaaatcactcctgaaccaggggagcagctcagaggaggttgcagggagctcccagaagatgggccaaccaggaccctcaggagatagtgatttggctacagcactgcatcgccttagcttgcgtcgacaaaactatttaagtgagaagcagttctttgctgaagaatggcagcggaagatccaggttctggcagaccagaaggaaggagttagtggctgtgtcaccccgacagagagccttgcctctctctgcaccacccagtcagagatcacagacctcagcagtgccagttgccttcgaggttttatgccagaaaaattacaaattgtcaagccccttgaaggatcacaaactctgtatcactggcagcagcttgctcaaccaaacttgggaaccatccttgatccacgaccaggtgtcattactaaaggctttacccagttgcccggggatgctatttatcacatctcagatttagaagaggatgaagaggagggtattacttttcaggttcagcaacctcttgaagtggaagagaaactttcaacatccaagccagtaacagggatcttcctgccacccattacttcagcaggtggaccagttacagttgcaaccgccaacccaggaaagtgcctgtcgtgcacaaactcaacattcactttcaccacctgtagaatattacatccctctgacatcactcaggttacccccagctctgggttcccttcattatcctgtggaagtagcggtagcagttcatccaacacggctgtgaattctcctgccttgtcctatagactcagcattggtgagtccatcaccaaccgacgagattccactacaaccttcagtagcaccatgagcttggccaaacttctacaagagcgaggcatctctgccaaagtgtaccacagcccaatttcagagaaccccctccagcctctccctaaatccctggctatcccttccacaccaccaaattcaccatctcactcaccttgcccttctcctttaccctttgagcctcgagtgcatctctctgaaaattttttggcctctcgaccagctgagacattcctccaggagatgtatggcttgagaccctcccggaaccctcctgatgttggccagttgaagatgaacttagtggacaggctgaagagactggggatagccagagtggtcaagaaccctggtgcccaagagaatggaagatgccaggaggcagaaattggtcctcaaaaaccagattctgctgtttatttaaattcaggtagcagtttattaggtggactaaggaggaatcagagtcttccagtcataatgggtagctttgctgccccagtttgcacatcctcacccaaaatgggtgtcctgaaggaggactgaggttcagcagttaactgaccttttatacaagttagcacatgaaggatagatatgcactgaaacatgtggtctggtctgacttgagagaaaaggaatgttgcacaagggttgtgaatgtgaaagggggaatggaggaatggaaataaaattgggatgagccctaatggaggaagtcgggcaaattgaaagtataaatgaatgggccatgagtgttcagagggagaaaagaaaggtttaatatactccttcagttgagttttcttgtcttgaacataaaaagtgaatacaaataaattcagtaatactaaaacatacagagatactgaacttgctggcacatttacttctggtaagcataaagcagagagaacccaggttagaaggatgggaagagaaaaggagcagttttattgcttatagaaagccgttctgaggggttggtggggtaagctcagtctattactgagacaatagtgagatggcttatatgtttcccctgttaatatctggttaaattatgtatccatcaaatggtatgctcgcagcattagcaaaattaggagtttcatctttttcattgaatcacaggtggagactcctattttcctttctgttttcaggcctttgagcccctgggagcccaaataccactcaattattttgtatttatgattaataaaagttcattttttaaatttgtatttttatacaacctccaaaaaaaaaaacaactgggtagagggtgggagggatttacttttaagaggcaaaatgtgagtaaattgaaaccaagaaaacttgtttttagaatatttcgtctgaataagtacagtagccaaggaatacaaacataattgcatgtttttaaaaattccttggaggctggaaggggttaagccagaagtgcaatcaataggaattagggaatgttgtatatttatatatgtaaactttttttgtaagaaaagttggtgacaactaaaccaactttttccaaagtgcgctatgcatatttttaatgaaagatgacatgtatttgcacaaaaattctcaggcacattaaattattgtaaactgaagtaaaacccgggtgcttgctttgagattgtggttttttcttcctaatgtaaaataaaataaaacacatctgccttcttgatatttatagaattagagaataaactttttaatgggggagtcaaagctttttctttttctctaaggttctttttttttattcaaactgtatgaaatggcaaagtgaggctctggggttagatttcagcattcagcagttgacacaggctaagaaatggaaagaagtagatctgttttttctcaatgttgctgagcaaagtctgcttctcatcagatgacgtggctttgtctagacagcacgcagttcagaaagaaatgtctttatacaaaagacatgatagagaaaagatgagagaggggactaattattttgtttatgaaaatggcaagtaaattacttgatctttttggtgcttaatttgcaaatgttttgttcctttgtcctgacttaaaggcagttttctgaagaactcttgactcttgctcctatggttcccataggcacacctattcccaggccaaggagagtccttcctctccccttttgaggcatccccgccatccccccacttagagctatgtgctcaaaaagccaacatgaatgcagtggtaaaaatttgttagtttcttatactttttagaatctctcaataaaatttttctaaataaattccacaaaaacaaagggtgaagatggtctctccctttcgttccccttcactcagttgtgctgaggtcaatagagtgtagagtttcagaaaggattccagcaggtttatatgtgaatataagtgtccctgaatggggcaggcattaaatagaagaatccctgctgtttaaatttcccgcatattccaattcacttttaaaaaataccatttgaatttgtatttcataaagtgactctggggtgcttactttagtcaattcttaaaattttttatttgttccctaagaaagtaattactgtttctgttgcctggacagttacagtttccaggaaacatcaggaagtaggaaactgtagggccagagagtagtacaacgttaaattgtccgatttatgtgtattacttaaagctataaattgaactagatcttgccgtgctctgtattgagtataatttgtatacttttttataattaatgactaaatgatcactttggaggcagggtggtgggggtgtattagcagccaaataagcacatctgatcaaaaagaaccaggcttagattttttttaagtacattgatgttgatgttccaccagaaacaccttaagtgtatactgttgtgtaatgtctctagaaaggaatcctgtcttaaaactgggttttgctgttttttgaagtttctacctaaaatcatttttggtatatcctgataatctctataatactagaattgtctgcaaaatatagtaagaagaattggagcctaatagctgattcctcccaatttatctgttatgttttgtcactattcacattttagtcttttctacgataaaaattgtatgtgtactttcatgccagtataggaaacctcaatcttttttttttttcgcctttaagaaggttttcagtgattatacctcaggtatttctgagtgtcctattgtctaataggagaaatatcttcccgagctcagaattaaaagttctcctaaattatgaagatcccaaatcttatgtaaataaccttaggcatgagtccttagggagaagttaatgaccattgttaaagtgcttttttagaaaatgttgtgctgtatgttcttgatttgacataaatgaatagactttggcaagggaggaaataagttaaaaggcagcttacaagagcctattccctataaagggtataattttacacagtactcaaagcttgttatcttttctgaccattttagtacagaattagtacttggtggttactaacatcaacttgtgacatctagaactagggctcttagtgtttagtgggccacttctctgatgtcagatgcatgcagacctgtactccacatgcaacccaacagcagtgcagtgtgataactgagcggtcgcatggcagaggacatccccctcagagtgggcacaagtgccctctagggcagccaggggaatactattgttcgatacctgggatttgactttgtcaaacagctctttgtgcccctatctttgttttgtcaaatgtagatcagttaataaacatgagtagcttgaattttca

SEQ ID NO: 49 - DNA, 449 bp, Homo sapiens
atatccactcctgctctccctcctgcaggtgaccccagccatgaggaccatcgccatccttgctgccattctcctggtggccctgcaggcccaggctgagtcactccaggaaagagctgatgaggctacaacccagaagcagtctggggaagacaaccaggaccttgctatctcctttgcaggaaatggactctctgctcttagaacctcaggttctcaggcaagagccacctgctattgccgaaccggccgttgtgctacccgtgagtccctctccggggtgtgtgaaatcagtggccgcctctacagactctgctgtcgctgagcttcctagatagaaaccaaagcagtgcaagattcagttcaaggtcctgaaaaaagaaaaacattttactctgtgtaccttgtgtctttctaaatttctctctccaaaataaagttcaagcatt

SEQ ID NO: 50 - DNA, 5598 bp, Homo sapiens
agagccactgaggcctgagcgagagccgacggcgggcgggcgcagctgctgccggagcgccggcgcgtgctggtgggccacacacctttcctcctcttcactcgcgagccctcggacatggtggcccccggctccgtgaccagccggctgggctcggtattccccttcctgctagtcctggtggatctgcagtacgaaggtgctgaatgtggagtaaatgcagatgttgagaaacatcttgaattgggcaagaaattacttgcagctggacagctagctgatgctttatctcagtttcatgctgccgtagatggtgaccctgataactatattgcttattatcggagggctactgtctttttagctatgggcaaatcaaaagctgcacttcctgatttaactaaagtgattcaattgaagatggacttcactgcagcaagattacagagaggtcacttattactcaaacaaggaaaacttgatgaagcagaagatgattttaaaaaagtgctcaaatctaatccaagtgaaaatgaagaaaaggaagcacagtctcaacttataaaatctgatgaaatgcagcgtttgcgttcacaagcacttaacgcttttggaagtggagattatactgctgctatagccttccttgataagattttagaggtttgtgtttgggatgcagaactacgggaacttcgagctgaatgttttataaaagaaggagaacctaggaaagctataagtgacttaaaagctgcgtcaaagttgaagaatgataatactgaagcgttttataaaataagcacactgtactaccaactaggagaccacgaactgtccctcagtgaagttcgggaatgtcttaaacttgaccaggatcataaaaggtgttttgcacactataaacaagtaaagaaacttaataagctgattgagtcagctgaagagctcatcagagatggcagatacacagatgctaccagcaaatatgaatctgtcatgaaaacagagccaagcattgctgaatatacagttcgttcaaaggagaggatttgccactgcttttctaaggacgagaagcctgttgaagctattagggtttgttctgaagttttacagatggaacctgacaatgtgaatgccctgaaagatcgagcagaggcctatttgatagaggaaatgtatgatgaagctattcaggattatgaaactgctcaggaacacaatgaaaatgatcagcagattcgagaaggtctagagaaagcacaaagattattgaaacagtcgcagaaacgagattattataaaatcttgggagtaaaaagaaatgccaaaaagcaagaaattattaaagcataccgaaaattagcactgcagtggcacccagataacttccagaatgaagaagaaaagaaaaaagctgagaaaaagttcattgatatagcagctgctaaagaagtcctctctgatccagaaatgagaaagaagtttgacgacggagaagatcctttggatgcagagagccagcaaggaggcggcggcaaccctttccacagaagctggaactcatggcaagggttcaatcccttcagctcaggcggaccatttagatttaaattccacttcaattaaaccaactgtttttctgctcttcttaatttttttaaagattaaaaacaaagaaatcttgttccgggaccctaatgaaaaaaaatttcaaatcttttcagtttgtccatgaccaaagagttgctttaataggaaaaaatctgttcttatccctgtcagatttatggttaatgggtttgcaacggcaaggaggcaaggaatggttctatttctgacagagcagcctgcatctgctttatgctgtctggagggaagtggtctgaggcaggctcacccgtggaagtgctcacgtattctgtattatttttctacactggagctgagattcttctcttcacagccttgcagagtaagtcagtgcctacaagtgtaagaaggagctgtaatcttcatgaggatggttatacttcagtattcttaaagagaacatgaacatttttgagctgtatgttcttagggacaactgtgcttcgatgtggtcagtctcgtcacttgtgagtagctgtgaaatctttagtgtgcatgtgtttgcacctctgtggtctgtcaacgtggctgtcactgaaggagcaagagaccatcttttaggaaccctgccaccaaataataatatatccaggcttagactttggattaatgttaaatgtacatttttttggttcagtacctgaagaagaatactgaaacttgaatctataaattcctatggacccttttaatattaaacacaacaaattaaaagttgttataggtaaaataagttcagataaaatagtggtggtatttaaaataatattgctgaagtgcagattgaaatactttttaaacaactgaagttctgagtttttatagggaatttcatgtaacaagactggtttagaaacgtaaagttgcgcagtcaacataaataaatacagaatgccatgttctccacttctaagtaaagacagtgggcagcttctgtttctccttctatcaaggcttcaccctatcttaaaggtctgtggtgcctcccacgtgggacctgtctgctggtatgtgttaaacagcagaccggcccttctaccagatcttgatgcctctgattttctcctgcctacaagaaaatacaggcaaggttagtcaggtctggctatatttccactgttgtttcatttaataagatggcatctcctcttgagatatgttcttcttaccttttaagaagatactatttaagaagtgaactattcagtctttgtatactgaatgctttttccctaaaaaatgttaatcaagaatattgaatatttatggcactcttgatgctgcatttgaaagctgaaggaattactttagatagataggaattgctacctttattctggaaaggttttgtttctgcctcaaagcattttgaagtgttttaaccattaaagggtctaatttttttttcttaatgaaatcaagcattttaattcactgtgggaggcatcctgaccacggacatccataacagcaaagcacaaatcgttttcgtctgtagtcatatcctgaaacataggtggacaaatttttaactgagagacaaaaatcacatagttgaattgagcagaacacttaagtgctttctgcatctatttaggagtctatttcttaccaataaacttgacaacgcatttggaaaactagtgaacaccttacagctttcattttgctttaatgtttcaattcaagccggtgtaaaaataatttccaaggcatttctgtttattctttagtaatctcactactggctatgtcagcaatatctttttcaatctggttccttttgtatatgatgtcactgtgacctctttgaaatatagtgatggcttttacctactttgaaaagaattttcacatagagtcagaaaaaaaaggaaatatcaaatcacttgcctttccacttggagagcacgacagttgccaacaacaaggggtcaagggccgcacaggagatgtgtgggggcctggccacctcccacctgctgcccagaggcttgtttgcattttcattttttctccacttgtaacaaccatagtttcagctcctaaattcttatcatggatttacttagtcatcttaactgacctgcagttacttgcctgttttcagtgaagagagagaagcagctctggtgccacatgccagtgccatggagggaaatgaattctctgcaatctgttgtttcgctgattcatgaagaaagtaacaactgttgagtttcagccttgatggctgtcggcagttttctggtgtccacccaaacggagagacagtcactcctgcttaccctaatgtgtgactgagaagcagcctgggtgtgtaaagagatagtcattccccctgcctgtctcactgtagggtagcattatccactgtaaaaccatactactttcattttcccttggggactacaggtgccaggtaacctttttttttttttttttttttttttgagacagaatcttgctctgttgcccaggctggagtgcagggacacctcccgggttcaagcagttctcctgcctcagcctccaagtagctgggactataggcacgcaccaccatgcctggctaatttttgtatttttagtagaaatggggtttcactgtgttagccaggatggtcttgatctcctgaccttgtgatctgcccgccttggccttccaaagtgttgggattacaggcgtgagccactgcgcctggccatcaggtaacctttatggctctttcaggaaaagtgaaatcagagaggcgtaccctagccacagctgttgtattctgctcttctttcctttttggtgagcttcatgggtggagttatcagtggtctgtactttgtggatattttgcccagcaggaagtattagacacatcagtctagaagcattgtgaaaaggttccaaaacgggagacaaaatttaattcattcctcagttctgaaagtttgtgctttcttaccatgaatagatgaaaacttgaaaaaaatcttgacagtttactaatgtgaatcagatgtaacgtactactaattctacaatgcctttctctttagtcagtattaaaaatcttttttaaagtattggtatgaaaacaaatttttgttgccctgataatggaattttaaaactacccacagtttaagagaaaacataacttggtaaaaaaggtagccaataaaaccacaatttgaaattgataccattttctactcacaatggatgatgaaaaatttcacctttaaatgggtcagaagttgtctttgacatttaccatgaaaaaactacataaaatggctccctggtgaggttacagacacggccctggtgatgggcgttgcaaagttttcactgagcacacagcaatggtatcacctagagaagttcacgcaactttgttgaatgtagttgacttttccaaatttataaaggaaggaagaaggcaaatgttaatttgccaacaacgaatatcctttttctaaatcagatcattccttttttgttagtggcagtttatcctgtaatttcaaatgacgttaagaggtgggattatttgggggttttttttgtttgtttacagatgatctcatttgctgaatgattgatttaagagtaaaattagccactgcgtggctttgtgtatagtaaccggttttgttgcacttgtctgtggctgaaacacttacctgcagtggaaagccgagcaaggaggaggtaaacattggagatgtttgtgaaaatattactcttgctgtgaggttttagtttgttttgaatgagaaaagactaagtaacttaatccatctcaatgtagtgttttaataaaaaaggaacctaatatttgaaatgggtctcagacatgtctacaaatatgggtactatttttatgcccgtgtattttcacatttaataaaaatatttatggtcatatcagtataaaaaaa

SEQ ID NO: 51 - DNA, 4552 bp, Homo sapiens
ctggacccctgccagggaaggggtcctcagacttgaggttgccagctcagatgtggggctgctgatactaggtgactggactgatgttctgttctagatgaaactccttgaggggaccatttgaaaaggcttgatgtgctgcccaaagcccccttcagagctgacttctccacccccagctgccgtgagccttggctgctgacagctcatagctgagtccctcccgtgaagtcaccttctgctgaagggtacatcctctcccaaggcgaagctggtccgttacatttgtaagcagaggcagtgcaagctgagcgtggctcccggtgagaggaccccagagctcaacagctacccccgcttcagcgactggctgtacactttcaacgtgaggccggaggtggtgcaggagatcccccgagacctcacgctggatgccctgctggagatgaatgaggccaaggtgaaggagacgctgcggcgctgtggggccagcggggatgagtgtggccgtctgcagtatgccctcacctgcctgcggaaggtgacaggcctgggaggggagcacaaggaggactccagttggagttcattggatgcgcggcgggaaagtggctcagggccttccacggacaccctctcagcagccagcctgccctggcccccagggagctcccagctgggcagagcaggcaacagcgcccagggcccacgctccatctccgtgtcagctctgcccgcctcagactcccccacccccagcttcagtgagggcctctcagacacctgtattcccctgcacgccagcggccggctgaccccccgtgccctgcacagcttcatcaccccgcccaccacaccccagctgcgacggcacaccaagctgaagccaccacggacgccccccccacccagccgcaaggtcttccagctgctgcccagcttccccacactcacccggagcaagtcccatgagtctcagctggggaaccgcattgatgacgtctcctcgatgaggtttgatctctcgcatggatccccacagatggtacggagggatatcgggctgtcggtgacgcacaggttctccaccaagtcctggctgtcgcaggtctgccacgtgtgccagaagagcatgatatttggagtgaagtgcaagcattgcaggttgaagtgtcacaacaaatgtaccaaagaagcccctgcctgtagaatatccttcctgccactaactcggcttcggaggacagaatctgtcccctcggacatcaacaacccggtggacagagcagccgaaccccattttggaaccctccccaaagcactgacaaagaaggagcaccctccggccatgaatcacctggactccagcagcaacccttcctccaccacctcctccacaccctcctcaccggcgcccttcccgacatcatccaacccatccagcgccaccacgccccccaacccctcacctggccagcgggacagcaggttcaacttcccagctgcctacttcattcatcatagacagcagtttatctttccagtgccatctgctggccattgctggaaatgcctccttattgcagaaagtttaaaggaaaacgctttcaacatttcagcctttgcacacgcagccccgctccctgaagctgccgacggtacccggctcgatgaccagccgaaagcagatgtgttggaagctcacgaagcggaggctgaggagccagaggctggcaagtcagaggcagaagacgatgaggacgaggtggacgacttgccgagctctcgccggccctggcggggccccatctctcgcaaggccagccagaccagcgtgtacctgcaggagtgggacatccccttcgagcaggtagagctgggcgagcccatcgggcagggccgctggggccgggtgcaccgcggccgctggcatggcgaggtggccattcgcctgctggagatggacggccacaaccaggaccacctgaagctcttcaagaaagaggtgatgaactaccggcagacgcggcatgagaacgtggtgctcttcatgggggcctgcatgaacccgccccacctggccattatcaccagcttctgcaaggggcggacgttgcactcgtttgtgagggaccccaagacgtctctggacatcaacaagacgaggcaaatcgctcaggagatcatcaagggcatgggatatcttcatgccaagggcatcgtacacaaagatctcaaatctaagaacgtcttctatgacaacggcaaggtggtcatcacagacttcgggctgtttgggatctcaggcgtggtccgagagggacggcgtgagaaccagctaaagctgtcccacgactggctgtgctatctggcccctgagattgtacgcgagatgacccccgggaaggacgaggatcagctgccattctccaaagctgctgatgtctatgcatttgggactgtttggtatgagctgcaagcaagagactggcccttgaagaaccaggctgcagaggcatccatctggcagattggaagcggggaaggaatgaagcgtgtcctgacttctgtcagcttggggaaggaagtcagtgagatcctgtcggcctgctgggctttcgacctgcaggagagacccagcttcagcctgctgatggacatgctggagaaacttcccaagctgaaccggcggctctcccaccctggacacttctggaagtcagctgagttgtaggcctggctgccttgcatgcaccaggggctttcttcctcctaatcaacaactcagcaccgtgacttctgctaaaatgcaaaatgagatgcgggcactaacccaggggatgccacctctgctgctccagtcgtctctctcgaggctacttcttttgctttgttttaaaaactggccctctgccctctccacgtggcctgcatatgcccaagtaactgctctcagaggatcccactaactgagctccctccaaggcagtctgggcagcttctaactaccttcctggacatgactgattgctcccgtgttcttctgagggctggtcttgtttttgtttgggtggctctgtctcactgctaacaccttagtgagatgccttccaccctcctgagcacaccagcctcccactgggtgtgtgcctagtgcggggcgggcggaggttgggagggtgttggcttggcttttaacctgtggggattttgtccaacaaggagtggaatgatttcagagctgccctgaggctggcaccctggtcacaggaaccctctgcgctggctcctgtctcagtcccctctgtagagttagatcagaagacacagaaagttctgtggccatgaaagataccagcttggaagggttgtgtcttcagtggcaccctcagaaaaattgtcttaaagcaaagaggtacctggctccagacaatttttctgatgaaaacaaagtctctgccccgtccccaccctgccaccctggcaaagttacttcctttacagctgcccagtgtaccatagaccagaccccaggtcagcatttgtcaagagcatggctgctgagtcccctgtggcagtcaatgcactgtttaccaaatgcaggtttctgttctccctccccagcaagacctgctgaacccagatctctggaatggggccctaggaatttgcatttcaacctgcttcccaggtggccctgatgcaccccagtattagagtttattgctaaaaggaacatgccctgtcactcctggtatcctgggagtcatgtttctcttctctctcagttctacttggagcaagagctttcctgggctgcaaatgagaaaacaattcctaggaacccacagcagtactgagcatgctgggagcttgggacttggagatgaatgagccaccgttgctgctccaagtaggactacttggagtgtagctgaggccttggacgcagtatgaccaggggcagctctgccagggctgttggccaatcagtcattttcatttcttgttggaggccaggtcctctgctgaactcatttcctagctagtgttaccctaattctgatgaagatcaatggggctataattcttgtttttgttcctctttgcagcattaacagcagcaaagttgtaccccggtttgaaaggtttggcttgggcgtcctggagtccagtaatccaaagatgtagccagccatatggtttttcgctgctgatctctttctttttaaaatgtgtttctgaaacatcccaacaaccaccacgacaaaaaaacactgcctgcccagcgctgcaaaccaggagcacacgtcctagattcagactgttggccataaaccccactcgggagatggagctgcacctgctatttcttaaaatgacaccaccaacaaccaaacctgtcatgacagacagcaaatgtttacacgtatatttctcctgagtgaacctgatgttttacaataggtaataataaaaacagtctgtgcaaaaaaaaaaaaaaaaaaaaaaaaaaaaaaaaaaaaaaaaaaaaaaaaaaaaaaaaaaaaaa

SEQ ID NO: 52 - DNA, 3111 bp, Homo sapiens
gcgagttgtgtgagccgccagtatggccgggctatggcggcgagcactggctacgtgcgactgtggggagcggcgcggtgctgggtgctgcggcggccgatgctggccgccgccggggggcgggttcccactgcagcaggagcgtggttgctccgaggccagcggacctgcgacgcctctcctccttgggcactgtggggccgaggcccggcaattgggggccaatggcgggggttttgggaagcgagcagccgcggcggaggcgcattctcggggggcgaggacgcctccgagggcggcgcggaggaaggagccggcggcgcggggggcagcgcgggcgccggggaaggcccggtcataacggcgctcacgcccatgacgatccccgatgtgtttccgcacctgccgctcatcgccatcacccgcaacccggtgttcccgcgctttatcaagattatcgaggttaaaaataagaagttggttgagctgctgagaaggaaagttcgtctcgcccagccttatgtcggcgtctttctaaagagagatgacagcaatgagtcggatgtggtcgagagcctggatgaaatctaccacacggggacgtttgcccagatccatgagatgcaggaccttggggacaagctgcgcatgatcgtcatgggacacagaagagtccatatcagcagacagctggaggtggagcccgaggagccggaggcggagaacaagcacaagccccgcaggaagtcaaagcggggcaagaaggaggcggaggacgagctgagcgccaggcacccggcggagctggcgatggagcccacccctgagctcccggctgaggtgctcatggtggaggtagagaacgttgtccacgaggacttccaggtcacggaggaggtgaaagccctgactgcagagatcgtgaagaccatccgggacatcattgccttgaaccctctctacagggagtcagtgctgcagatgatgcaggctggccagcgggtggtggacaaccccatctacctgagcgacatgggcgccgcgctcaccggggccgagtcccatgagctgcaggacgtcctggaagagaccaatattcctaagcggctgtacaaggccctctccctgctgaagaaggaatttgaactgagcaagctgcagcagcgcctggggcgggaggtggaggagaagatcaagcagacccaccgtaagtacctgctgcaggagcagctaaagatcatcaagaaggagctgggcctggagaaggacgacaaggatgccatcgaggagaagttccgggagcgcctgaaggagctcgtggtccccaagcacgtcatggatgttgtggacgaggagctgagcaagctgggcctgctggacaaccactcctcggagttcaatgtcacccgcaactacctagactggctcacgtccatcccttggggcaagtacagcaacgagaacctggacctggcgcgggcacaggcagtgctggaggaagaccactacggcatggaggacgtcaagaaacgcatcctggagttcattgccgttagccagctccgcggctccacccagggcaagatcctctgcttctatggcccccctggcgtgggtaagaccagcattgctcgctccatcgcccgcgccctgaaccgagagtacttccgcttcagcgtcgggggcatgactgacgtggctgagatcaagggccacaggcggacctacgtgggcgccatgcccgggaagatcatccagtgtttgaagaagaccaagacggagaaccccctgatcctcatcgacgaggtggacaagatcggccgaggctaccagggggacccgtcgtcggcactgctggagctgctggacccagagcagaatgccaacttcctggaccactacctggacgtgcccgtggacttgtccaaggtgctgttcatctgcacggccaacgtcacggacaccatccccgagccgctgcgagaccgtatggagatgatcaacgtgtcgggctacgtggcccaggagaagctggccattgcggagcgctacctggtgccccaggctcgcgccctgtgtggcttggatgagagcaaggccaagctgtcatcggacgtgctgacgctgctcatcaagcagtactgccgcgagagcggtgtccgcaacctgcagaagcaagtggagaaggtgttacggaaatcggcctacaagattgtcagcggcgaggccgagtccgtggaggtgacgcccgagaacctgcaggacttcgtggggaagcccgtgttcaccgtggagcgcatgtatgacgtgacaccgcccggcgtggtcatggggctggcctggaccgcaatgggaggctccacgctgtttgtggagacatccctgagacggccacaggacaaggatgccaagggtgacaaggatggcagcctggaggtgacaggccagctgggggaggtgatgaaggagagcgcccgcatagcctacaccttcgccagagccttcctcatgcagcacgcccccgccaatgactacctggtgacctcacacatccacctgcatgtgcccgagggcgccacccccaaggacggcccaagcgcaggctgcaccatcgtcacggccctgctgtccctggccatgggcaggcctgtccggcagaatctggccatgactggcgaagtctccctcacgggcaagatcctgcctgttggtggcatcaaggagaagaccattgcggccaagcgcgcaggggtgacgtgcatcgtcctgccagccgagaacaagaaggacttctacgacctggcagccttcatcaccgagggcctggaggtgcacttcgtggaacactaccgggagatcttcgacatcgccttcccggacgagcaggcagaggcgctggccgtggaacggtgacggccaccccgggactgcaggcggcggatgtcaggccctgtctgggccagaactgagcgctgtggggagcgcgcccggacctggcagtggagccaccgagcgagcagctcggtccagtgacccagatcccagggacctcagtcggcttaatcagagtgtggcatagaagctatttaatgattaaagtcatttgcagta

SEQ ID NO: 53 - DNA, 3490 bp, Homo sapiens
cccctaggggcccctgggacgaggaggaagcgccaggtccttcccgccgccgccgccgccgccgccgcctgctcccctggcacgcgccccgccgccctcggcagccgcagctccgtgtcccctgagaaccagccgtcccgcgccatgggcacgcgtctgccgctcgtcctgcgccagctccgccgcccgccccagcccccgggccctccgcgccgcctccgtgtgccctgtcgcgctagcagcggcggcggcggaggcggcggcggtggccgggagggcctgcttggacagcggcggccgcaggatggccaggcccggagcagctgcagccccggcggccgaacgcccgcggcgcgggactccatcgtcagagaagtcattcagaattcaaaagaagttctaagtttattgcaagaaaaaaaccctgccttcaagccggttcttgcaattatccaggcaggtgacgacaacttgatgcaggaaatcaaccagaatttggctgaggaggctggtctgaacatcactcacatttgcctccctccagatagcagtgaagccgagattatagatgaaatcttaaagatcaatgaagataccagagtacatggccttgcccttcagatctctgagaacttgtttagcaacaaagtcctcaatgccttgaaaccagaaaaagatgtggatggagtaacagacataaacctggggaagctggtgcgaggggatgcccatgaatgttttgtttcacctgttgccaaagctgtaattgaacttcttgaaaaatcagtaggtgtcaacctagatggaaagaagattttggtagtgggggcccatgggtctttggaagctgctctacaatgcctgttccagagaaaagggtccatgacaatgagcatccagtggaaaacacgccagcttcaaagcaagcttcacgaggctgacattgtggtcctaggctcacctaagccagaagagattccccttacttggatacaaccaggaactactgttctcaactgctcccatgacttcctgtcagggaaggttgggtgtggctctccaagaatacattttggtggactcattgaggaagatgatgtgattctccttgctgcagctctgcgaattcagaacatggtcagtagtggaaggagatggcttcgtgaacagcagcacaggcggtggagacttcactgcttgaaacttcagcctctctcccctgtgccaagtgacattgagatttcaagaggacaaactccaaaagctgtggatgtccttgccaaggagattggattgcttgcagatgaaattgaaatctatggcaaaagcaaagccaaagtacgtttgtccgtgctagaaaggttaaaggatcaagcagatggaaaatacgtcttagttgctgggatcacacccacccctcttggagaagggaagagcacagtcaccatcgggcttgtgcaggctctgaccgcacacctgaatgtcaactcctttgcctgcttgaggcagccttcccaaggaccgacgtttggagtgaaaggaggagccgcgggtggtggatatgcccaggtcatccccatggaggagttcaaccttcacttgactggagacatccacgccatcaccgctgccaataacttgctggctgccgccatcgacacgaggattcttcatgaaaacacgcaaacagataaggctctgtataatcggctggttcctttagtgaatggtgtcagagaattttcagaaattcagcttgctcggctaaaaaaactgggaataaataagactgatccgagcacactgacagaagaggaagtgagtaaatttgcccgtctcgacatcgacccatctaccatcacgtggcagagagtattggatacaaatgaccgatttctacgaaaaataaccatcgggcagggaaacacagagaagggccattaccggcaggcgcagtttgacatcgcagtggccagcgagatcatggcggtgctggccctgacggacagcctcgcagacatgaaggcacggctgggaaggatggtggtggccagtgacaaaagcgggcagcctgtgacagcagatgatttgggggtgacaggtgctttgacagttttgatgaaagatgcaataaaaccaaacctgatgcagaccctggaagggacacctgtgttcgtgcatgcgggcccttttgctaacattgctcacggcaactcttcagtgttggctgataaaattgccctgaaactggttggtgaagaaggatttgtagtgaccgaagctggctttggtgctgacatcggaatggagaaattcttcaacatcaagtgccgagcttccggcttggtgcccaacgtggttgtgttagtggcaacggtgcgagctctgaagatgcatggaggcgggccaagtgtaacggctggtgttcctcttaagaaagaatatacagaggagaacatccagctggtggcagacggctgctgtaacctccagaagcaaattcagatcactcagctctttggggttcccgttgtggtggctctgaatgtcttcaagaccgacacccgcgctgagattgacttggtgtgtgagcttgcaaagcgggctggtgcctttgatgcagtcccctgctatcactggtccgttggtggaaaaggatcggtggacttggctcgggctgtgagagaggctgcgagtaaaagaagccgattccagttcctgtatgatgttcaggttccaattgtggacaagataaggaccattgctcaggctgtctatggagccaaagatattgaactctctcctgaggcacaagccaaaatagatcgttacactcaacagggttttggaaatttgcccatctgcatggcaaagacccacctttctctatctcaccaacctgacaaaaaaggtgtgccaagggacttcatcttacctatcagtgacgtccgggccagcataggcgctgggttcatttaccctttggtcggaacgatgagcaccatgccaggactgcccacccggccctgcttttatgacatagatcttgataccgaaacagaacaagttaaaggcttgttctaagtggacaaggctctcacaggacccgatgcagactcctgaaacagactactctttgcctttttgctgcagttggagaagaaactgaatttgaaaaatgtctgttatgcaatgctggagacatggtgaaataggccaaagatttcttcttcgttcaagatgaattctgttcacagtggagtatggtgttcggcaaaaggacctccaccaagactgaaagaaactaatttatttctgtttctgtggagtttccattatttctactgcttacactttagaatgtttattttatggggactaagggattaggagtgtgaactaaaaggtaacattttccactctcaagttttctactttgtctttgaactgaaaataaacatggatctagaaaaccaaaaaaaaaaaaaaa

SEQ ID NO: 54 - DNA, 3487 bp, Homo sapiens
cccctaggggcccctgggacgaggaggaagcgccaggtccttcccgccgccgccgccgccgccgccgcctgctcccctggcacgcgccccgccgccctcggcagccgcagctccgtgtcccctgagaaccagccgtcccgcgccatgggcacgcgtctgccgctcgtcctgcgccagctccgccgcccgccccagcccccgggccctccgcgccgcctccgtgtgccctgtcgcgctagcagcggcggcggcggaggcggcggcggtggccgggagggcctgcttggacagcggcggccgcaggatggccaggcccggagcagctgcagccccggcggccgaacgcccgcggcgcgggactccatcgtcagagaagtcattcagaattcaaaagaagttctaagtttattgcaagaaaaaaaccctgccttcaagccggttcttgcaattatccaggcaggtgacgacaacttgatgcaggaaatcaaccagaatttggctgaggaggctggtctgaacatcactcacatttgcctccctccagatagcagtgaagccgagattatagatgaaatcttaaagatcaatgaagataccagagtacatggccttgcccttcagatctctgagaacttgtttagcaacaaagtcctcaatgccttgaaaccagaaaaagatgtggatggagtaacagacataaacctggggaagctggtgcgaggggatgcccatgaatgttttgtttcacctgttgccaaagctgtaattgaacttcttgaaaaatcaggtgtcaacctagatggaaagaagattttggtagtgggggcccatgggtctttggaagctgctctacaatgcctgttccagagaaaagggtccatgacaatgagcatccagtggaaaacacgccagcttcaaagcaagcttcacgaggctgacattgtggtcctaggctcacctaagccagaagagattccccttacttggatacaaccaggaactactgttctcaactgctcccatgacttcctgtcagggaaggttgggtgtggctctccaagaatacattttggtggactcattgaggaagatgatgtgattctccttgctgcagctctgcgaattcagaacatggtcagtagtggaaggagatggcttcgtgaacagcagcacaggcggtggagacttcactgcttgaaacttcagcctctctcccctgtgccaagtgacattgagatttcaagaggacaaactccaaaagctgtggatgtccttgccaaggagattggattgcttgcagatgaaattgaaatctatggcaaaagcaaagccaaagtacgtttgtccgtgctagaaaggttaaaggatcaagcagatggaaaatacgtcttagttgctgggatcacacccacccctcttggagaagggaagagcacagtcaccatcgggcttgtgcaggctctgaccgcacacctgaatgtcaactcctttgcctgcttgaggcagccttcccaaggaccgacgtttggagtgaaaggaggagccgcgggtggtggatatgcccaggtcatccccatggaggagttcaaccttcacttgactggagacatccacgccatcaccgctgccaataacttgctggctgccgccatcgacacgaggattcttcatgaaaacacgcaaacagataaggctctgtataatcggctggttcctttagtgaatggtgtcagagaattttcagaaattcagcttgctcggctaaaaaaactgggaataaataagactgatccgagcacactgacagaagaggaagtgagtaaatttgcccgtctcgacatcgacccatctaccatcacgtggcagagagtattggatacaaatgaccgatttctacgaaaaataaccatcgggcagggaaacacagagaagggccattaccggcaggcgcagtttgacatcgcagtggccagcgagatcatggcggtgctggccctgacggacagcctcgcagacatgaaggcacggctgggaaggatggtggtggccagtgacaaaagcgggcagcctgtgacagcagatgatttgggggtgacaggtgctttgacagttttgatgaaagatgcaataaaaccaaacctgatgcagaccctggaagggacacctgtgttcgtgcatgcgggcccttttgctaacattgctcacggcaactcttcagtgttggctgataaaattgccctgaaactggttggtgaagaaggatttgtagtgaccgaagctggctttggtgctgacatcggaatggagaaattcttcaacatcaagtgccgagcttccggcttggtgcccaacgtggttgtgttagtggcaacggtgcgagctctgaagatgcatggaggcgggccaagtgtaacggctggtgttcctcttaagaaagaatatacagaggagaacatccagctggtggcagacggctgctgtaacctccagaagcaaattcagatcactcagctctttggggttcccgttgtggtggctctgaatgtcttcaagaccgacacccgcgctgagattgacttggtgtgtgagcttgcaaagcgggctggtgcctttgatgcagtcccctgctatcactggtccgttggtggaaaaggatcggtggacttggctcgggctgtgagagaggctgcgagtaaaagaagccgattccagttcctgtatgatgttcaggttccaattgtggacaagataaggaccattgctcaggctgtctatggagccaaagatattgaactctctcctgaggcacaagccaaaatagatcgttacactcaacagggttttggaaatttgcccatctgcatggcaaagacccacctttctctatctcaccaacctgacaaaaaaggtgtgccaagggacttcatcttacctatcagtgacgtccgggccagcataggcgctgggttcatttaccctttggtcggaacgatgagcaccatgccaggactgcccacccggccctgcttttatgacatagatcttgataccgaaacagaacaagttaaaggcttgttctaagtggacaaggctctcacaggacccgatgcagactcctgaaacagactactctttgcctttttgctgcagttggagaagaaactgaatttgaaaaatgtctgttatgcaatgctggagacatggtgaaataggccaaagatttcttcttcgttcaagatgaattctgttcacagtggagtatggtgttcggcaaaaggacctccaccaagactgaaagaaactaatttatttctgtttctgtggagtttccattatttctactgcttacactttagaatgtttattttatggggactaagggattaggagtgtgaactaaaaggtaacattttccactctcaagttttctactttgtctttgaactgaaaataaacatggatctagaaaaccaaaaaaaaaaaaaaa

SEQ ID NO: 55 - DNA, 1072 bp, Homo sapiens
cccctaggggcccctgggacgaggaggaagcgccaggtccttcccgccgccgccgccgccgccgccgcctgctcccctggcacgcgccccgccgccctcggcagccgcagctccgtgtcccctgagaaccagccgtcccgcgccatgggcacgcgtctgccgctcgtcctgcgccagctccgccgcccgccccagcccccgggccctccgcgccgcctccgtgtgccctgtcgcgctagcagcggcggcggcggaggcggcggcggtggccgggagggcctgcttggacagcggcggccgcaggatggccaggcccggagcagctgcagccccggcggccgaacgcccgcggcgcgggactccatcgtcagagaagtcattcagaattcaaaagaagttctaagtttattgcaagaaaaaaaccctgccttcaagccggttcttgcaattatccaggcaggtgacgacaacttgatgcaggaaatcaaccagaatttggctgaggaggctggtctgaacatcactcacatttgcctccctccagatagcagtgaagccgagattatagatgaaatcttaaagatcaatgaagataccagagtacatggccttgcccttcagatctctgagaacttgtttagcaacaaagtcctcaatgccttgaaaccagaaaaagatgtggatggagtaacagacataaacctggggaagctggtgcgaggggatgcccatgaatgttttgtttcacctgttgccaaagctgtaattgaacttcttgaaaaatcaggtgtcaacctagatggaaagaagattttggtagtgggggcccatgggtctttggaagctgctctacaatgcctgttccagagaaaagggtccatgacaatgagcatccagtggaaaacacgccagcttcaaagcaagacggagtctcgttctgtcaccaggctggagtgcaggcgcgtgatctaggctcactgcaagctctgcctcccaggttgaagtgattctcctgtgaaagggaattatttttgatgagtcattaaagtatatccattcccagaaaaaaaaa

SEQ ID NO: 56 - DNA, 3174 bp, Homo sapiens
acgtgcgcagccggccgccggctctgatgcaatcgcgccgggcgcgacccagacgagaagtcattcagaattcaaaagaagttctaagtttattgcaagaaaaaaaccctgccttcaagccggttcttgcaattatccaggcaggtgacgacaacttgatgcaggaaatcaaccagaatttggctgaggaggctggtctgaacatcactcacatttgcctccctccagatagcagtgaagccgagattatagatgaaatcttaaagatcaatgaagataccagagtacatggccttgcccttcagatctctgagaacttgtttagcaacaaagtcctcaatgccttgaaaccagaaaaagatgtggatggagtaacagacataaacctggggaagctggtgcgaggggatgcccatgaatgttttgtttcacctgttgccaaagctgtaattgaacttcttgaaaaatcagtaggtgtcaacctagatggaaagaagattttggtagtgggggcccatgggtctttggaagctgctctacaatgcctgttccagagaaaagggtccatgacaatgagcatccagtggaaaacacgccagcttcaaagcaagcttcacgaggctgacattgtggtcctaggctcacctaagccagaagagattccccttacttggatacaaccaggaactactgttctcaactgctcccatgacttcctgtcagggaaggttgggtgtggctctccaagaatacattttggtggactcattgaggaagatgatgtgattctccttgctgcagctctgcgaattcagaacatggtcagtagtggaaggagatggcttcgtgaacagcagcacaggcggtggagacttcactgcttgaaacttcagcctctctcccctgtgccaagtgacattgagatttcaagaggacaaactccaaaagctgtggatgtccttgccaaggagattggattgcttgcagatgaaattgaaatctatggcaaaagcaaagccaaagtacgtttgtccgtgctagaaaggttaaaggatcaagcagatggaaaatacgtcttagttgctgggatcacacccacccctcttggagaagggaagagcacagtcaccatcgggcttgtgcaggctctgaccgcacacctgaatgtcaactcctttgcctgcttgaggcagccttcccaaggaccgacgtttggagtgaaaggaggagccgcgggtggtggatatgcccaggtcatccccatggaggagttcaaccttcacttgactggagacatccacgccatcaccgctgccaataacttgctggctgccgccatcgacacgaggattcttcatgaaaacacgcaaacagataaggctctgtataatcggctggttcctttagtgaatggtgtcagagaattttcagaaattcagcttgctcggctaaaaaaactgggaataaataagactgatccgagcacactgacagaagaggaagtgagtaaatttgcccgtctcgacatcgacccatctaccatcacgtggcagagagtattggatacaaatgaccgatttctacgaaaaataaccatcgggcagggaaacacagagaagggccattaccggcaggcgcagtttgacatcgcagtggccagcgagatcatggcggtgctggccctgacggacagcctcgcagacatgaaggcacggctgggaaggatggtggtggccagtgacaaaagcgggcagcctgtgacagcagatgatttgggggtgacaggtgctttgacagttttgatgaaagatgcaataaaaccaaacctgatgcagaccctggaagggacacctgtgttcgtgcatgcgggcccttttgctaacattgctcacggcaactcttcagtgttggctgataaaattgccctgaaactggttggtgaagaaggatttgtagtgaccgaagctggctttggtgctgacatcggaatggagaaattcttcaacatcaagtgccgagcttccggcttggtgcccaacgtggttgtgttagtggcaacggtgcgagctctgaagatgcatggaggcgggccaagtgtaacggctggtgttcctcttaagaaagaatatacagaggagaacatccagctggtggcagacggctgctgtaacctccagaagcaaattcagatcactcagctctttggggttcccgttgtggtggctctgaatgtcttcaagaccgacacccgcgctgagattgacttggtgtgtgagcttgcaaagcgggctggtgcctttgatgcagtcccctgctatcactggtccgttggtggaaaaggatcggtggacttggctcgggctgtgagagaggctgcgagtaaaagaagccgattccagttcctgtatgatgttcaggttccaattgtggacaagataaggaccattgctcaggctgtctatggagccaaagatattgaactctctcctgaggcacaagccaaaatagatcgttacactcaacagggttttggaaatttgcccatctgcatggcaaagacccacctttctctatctcaccaacctgacaaaaaaggtgtgccaagggacttcatcttacctatcagtgacgtccgggccagcataggcgctgggttcatttaccctttggtcggaacgatgagcaccatgccaggactgcccacccggccctgcttttatgacatagatcttgataccgaaacagaacaagttaaaggcttgttctaagtggacaaggctctcacaggacccgatgcagactcctgaaacagactactctttgcctttttgctgcagttggagaagaaactgaatttgaaaaatgtctgttatgcaatgctggagacatggtgaaataggccaaagatttcttcttcgttcaagatgaattctgttcacagtggagtatggtgttcggcaaaaggacctccaccaagactgaaagaaactaatttatttctgtttctgtggagtttccattatttctactgcttacactttagaatgtttattttatggggactaagggattaggagtgtgaactaaaaggtaacattttccactctcaagttttctactttgtctttgaactgaaaataaacatggatctagaaaaccaaaaaaaaaaaaaaa

SEQ ID NO: 57 - DNA, 10389 bp, Homo sapiens
tccggtcggcattttgttctgagagggagagacggaacgagagagagacacacacagggctccttccccccgccctcccccccctccctccgtcggtaccgactcacccgacaccaccaagccgcagggagggacgcccccgccgacaggagaattggttcccgggcccgcggcgatgcccccccggtagctcgggcccgtggtcgggtgtttgtgagtgtttctatgtgggagaaggaggaggaggaggaagaagaagcaacgatttgtcttctcggctggtctccccccggctctacatgttccccgcactgaggagacggaagaggagccgtagccaccccccctcccggcccggattatagtctctcgccacagcggcctcggcctccccttggattcagacgccgattcgcccagtgtttgggaaatgggaagtaatgacagctggcacctgaactaagtacttttataggcaacaccattccagaaattcaggatgaatggggatatgccccatgtccccattactactcttgcggggattgctagtctcacagacctcctgaaccagctgcctcttccatctcctttacctgctacaactacaaagagccttctctttaatgcacgaatagcagaagaggtgaactgccttttggcttgtagggatgacaatttggtttcacagcttgtccatagcctcaaccaggtatcaacagatcacatagagttgaaagataaccttggcagtgatgacccagaaggtgacataccagtcttgttgcaggccgtcctggcaaggagtcctaatgttttcagggagaaaagcatgcagaacagatatgtacaaagtggaatgatgatgtctcagtataaactttctcagaattccatgcacagtagtcctgcatcttccaattatcaacaaaccactatctcacatagcccctccagccggtttgtgccaccacagacaagctctgggaacagatttatgccacagcaaaatagcccagtgcctagtccatacgccccacaaagccctgcaggatacatgccatattcccatccttcaagttacacaacacatccacagatgcaacaagcatcggtatcaagtcccattgttgcaggtggtttgagaaacatacatgataataaagtttctggtccgttgtctggcaattcagctaatcatcatgctgataatcctagacatggttcaagtgaggactacctacacatggtgcacaggctaagtagtgacgatggagattcttcaacaatgaggaatgctgcatcttttcccttgagatctccacagccagtatgctcccctgctggaagtgaaggaactcctaaaggctcaagaccacctttaatcctacaatctcagtctctaccttgttcatcacctcgagatgttccaccagatatcttgctagattctccagaaagaaaacaaaagaagcagaagaaaatgaaattaggcaaggatgaaaaagagcagagtgagaaagcggcaatgtatgatataattagttctccatccaaggactctactaaacttacattaagactttctcgtgtaaggtcttcagacatggaccagcaagaggatatgatttctggtgtggaaaatagcaatgtttcagaaaatgatattccttttaatgtgcagtacccaggacagacttcaaaaacacccattactccacaagatataaaccgcccactaaatgctgctcaatgtttgtcgcagcaagaacaaacagcattccttccagcaaatcaagtgcctgttttacaacagaacacttcagttgctgcaaaacaaccccagacttctgtggtacagaatcaacaacagatatcacaacagggacctatatatgatgaagtggaattggatgcattggctgaaattgagcgaatagagagagaatcagctattgaaagggagcgcttctcaaaagaagttcaagataaagataagcctttgaaaaaaagaaaacaagattcttacccacaggaggctgggggtgctacaggaggtaatagaccagcttctcaggagacgggttctacgggaaatgggtcaaggccagcattaatggttagcattgatcttcatcaggcaggaagagtggactctcaggcttctataactcaggattcagactccataaaaaagcctgaagaaatcaaacaatgtaatgatgcacctgtttctgttcttcaggaagatattgttggaagtcttaaatctacaccagaaaaccatcctgagacacctaaaaaaaagtctgatcctgagctttcaaagagtgaaatgaaacaaagtgaaagtagattagcagaatctaaaccaaatgaaaaccgattggtggagacaaaatcaagtgaaaataagttagaaactaaagttgagacccaaacagaagaacttaaacagaatgagagcagaacaactgaatgcaaacaaaacgagagcaccatagttgagcctaaacaaaatgaaaatagactgtctgacacaaaaccaaatgacaacaaacaaaataatggcagatcagaaacaacaaaatcaaggcctgaaaccccaaagcaaaagggtgaaagccggcctgagactccaaaacaaaagagtgatgggcatcctgaaaccccaaaacagaagggtgatggaaggcctgaaactccaaagcaaaaaggtgagagccgccctgaaactccaaagcaaaaaaatgaagggcgacctgaaacaccaaaacacaggcatgacaataggagggattctggaaagccatctacagagaaaaaacctgaagtgtctaaacataaacaagatactaaatctgactcacctcggttaaaatcagaacgagctgaagccttaaagcagagacctgatgggcgatctgtttctgagtcactaagacgtgaccatgataataaacaaaaatcagatgacaggggtgaatcagagcgacatcgaggggatcagtctagggttcgaagaccagaaacattgagatcctctagtagaaatgaacatggcattaaatctgatagttcaaaaactgataaactagaacgaaaacacaggcatgaatcaggggactcaagggaaagaccatcttctggggaacaaaaatcaagacctgacagtcctcgtgttaaacaaggagattctaataaatcaagatctgataaacttggttttaaatcaccaactagtaaagatgacaaaaggacagagggtaacaagagtaaagtagacactaataaagcacaccctgacaataaggcagaatttccaagttatttgttggggggcaggtctggtgcgttgaaaaattttgtcattccgaaaatcaagagggataaagatggcaatgttactcaggagacaaagaaaatggaaatgaaaggagagccgaaagacaaagtagaaaaaataggattagttgaagatctaaataaaggagctaagcctgtagttgtgctacaaaaactgtctttggatgatgttcagaaacttattaaagatagagaggacaaatcaagaagttcccttaaacctatcaagaataaaccatcaaagtcaaataaaggtagtatagatcaatcagtgttaaaagaattaccccctgaactcctggcagaaattgagtccaccatgccactttgtgaacgtgtgaaaatgaacaaacgcaagcgtagcacagttaatgaaaagccaaaatatgctgaaatcagttcagatgaagataatgatagtgatgaagcttttgaatcctctaggaaacgacataaaaaagatgatgataaagcttgggaatatgaagagcgtgacagaagaagctctggggatcataggagaagtggccactctcatgaaggaagaaggagttcaggtggtggtcgttatcgaaaccgaagtccgtcagattctgacatggaagattattctcctcctcccagccttagtgaggttgctaggaaaatgaagaaaaaagaaaaacagaagaaaaggaaagcatatgaaccaaaactaacacctgaagaaatgatggactcttcaacttttaagagattcacagcctcaatagagaatattttggataatttggaagatatggattttactgcgtttggtgatgatgatgaaattcctcaggaactgctcttaggaaaacatcagcttaatgaacttggcagtgaatctgctaaaataaaagcaatgggtataatggataagctttcaactgacaaaactgtgaaagtcttaaatatcttggagaagaatattcaggatgggtcaaagctttccactttgttaaatcataataacgatactgaagaagaagaaaggttatggagagaccttattatggagagagttacaaaatcagcggatgcttgtcttacaactatcaacattatgacatcccctaacatgccaaaagctgtgtacattgaggatgtaattgaaagagttatacagtacactaaatttcatttgcagaatacactttatcctcagtatgatcctgtttacagattagatcctcatggaggaggcttattaagttcaaaagcaaaacgggctaaatgttctacccataagcagagagtaatagtaatgctttataacaaagtttgtgacattgttagcagcttatcagaattgctagagatacaacttcttacagacacaacaattcttcaggtttcatctatgggaataacaccattttttgtggaaaatgtcagtgaactacagttgtgtgccattaagttagtcactgcagtattctcaagatatgaaaaacataggcagttaattttggaagaaatttttacttcacttgcaagattaccaaccagcaagaggagtttaaggaacttcaggttaaacagtagtgatatggatggagaacctatgtatattcagatggttacagcactggttttacaacttattcagtgtgtggtacacttaccatcatcagagaaggactctaatgcagaagaagattcaaataaaaaaattgaccaggatgttgtcattactaactcttatgaaacagctatgcgaacagcccaaaacttcctctccatcttccttaaaaaatgtggtagtaagcaaggtgaagaagattacagaccactgtttgaaaattttgttcaagaccttctttcaacagtcaataagcctgaatggccagctgctgaactactccttagtttgttagggagactgttggttcatcagttcagtaacaagtcaacagagatggctttaagagtggcatctcttgattaccttggaactgttgctgcacggctaagaaaagatgctgttacaagcaaaatggatcaaggatctatagaacgcattttaaaacaggtttcaggaggggaagatgaaatccaacaattacaaaaagcattgcttgattacttggatgaaaacactgagactgatccttcactagtgttttctcgtaaattctatatagcccagtggtttcgagacacaactctggaaacagaaaaagcaatgaaatcacaaaaagatgaagaatcatctgaaggaacacatcatgcaaaggaaattgagacaactggccaaattatgcatcgagctgaaaaccgaaaaaagtttcttagaagcattatcaaaaccacaccttctcagtttagcacattaaagatgaactctgatactgtggactatgatgatgcttgcttgattgttcgatacttggcctccatgaggccgtttgcccagagctttgatatttatttgacacagatcctacgagttcttggtgaaaatgcaattgctgttcgaacaaaagccatgaagtgtttgtctgaggttgttgctgtagaccccagtattctagcaaggcttgatatgcaacgaggtgttcatggacgattgatggataattcgactagtgtccgagaagcagcagtagaattactaggtcgatttgtcctttgtcgacctcagcttgctgaacagtattatgatatgctgattgaaagaatattggatactggtatcagtgtcaggaaaagagtaataaagattctcagagacatttgtattgaacaaccaacatttccaaaaatcacagaaatgtgtgtaaaaatgattcgcagagtcaatgatgaagagggcattaagaaattagtaaatgaaacattccagaaactctggtttactccaactccacacaatgacaaagaagcaatgacaaggaaaattttaaacattaccgatgtggttgcagcatgcagagatactggatatgactggtttgagcaactgcttcaaaacttgttgaagtccgaagaggattcctcatataaacctgtgaagaaagcttgtactcaacttgttgataacctagttgagcacattcttaaatatgaggaatctctagctgactctgacaataaaggtgtgaattctggaagattggtagcttgcataaccactttgttcttattcagcaaaataagaccccagctcatggttaaacatgcaatgactatgcaaccataccttaccactaaatgtagtacgcaaaatgatttcatggttatctgcaatgttgcaaaaatcctagagctagttgtaccactgatggagcatccaagtgaaacttttcttgccactattgaggaagatctaatgaagctcatcatcaaatatggcatgactgtagtgcaacattgtgtgagctgtcttggagctgttgtaaataaagtgacacaaaattttaaatttgtgtgggcttgtttcaatagatactatggtgccatttcaaaattaaaaagtcaacaccaagaggacccaaataacacttcacttctaacaaacaaaccagcacttcttagatcccttttcaccgttggagcactatgtcggcattttgattttgatctggaagattttaaaggcaacagcaaggttaacataaaagataaagtacttgaactattgatgtattttacaaaacactcagatgaagaagtacaaacaaaagctatcattggtctaggatttgcctttattcagcatccaagtctaatgttcgagcaagaagtgaagaatctatataataatattttatctgataagaactcctcagtcaatttaaaaatacaagtgttaaaaaacctccagacctacctacaagaagaagatacacgtatgcagcaggcagatagagactggaagaaagttgcaaaacaggaagacttaaaagaaatgggtgatgtttcctcagggatgagtagttccatcatgcagctttatctcaaacaggtgcttgaggcattttttcacacccagtcaagtgtacgccactttgccctaaatgtcattgcattgactctaaatcaaggtcttattcatccagttcagtgtgtgccatatttaattgctatgggcacagacccagaacctgctatgcggaacaaggctgatcagcaacttgtggaaatagacaaaaaatatgctggattcattcatatgaaagcagtggctggtatgaagatgtcttaccaggtacaacaggcaatcaacacatgcctaaaagatcctgtaaggggtttcagacaagacgagtcctctagcgctttgtgttcacacctttactccatgatccgtggaaaccgccaacacagacgagcctttcttatttctttactcaacctctttgatgacacagcaaaaacagacgtgactatgctcttgtatatagcagacaatctagcctgttttccataccagacacaggaagagccgttgtttataatgcatcatatagacattacactctcagtttctggtagtaacctactgcagtcattcaaggagtctatggtaaaggacaaaaggaaagagagaaaatcatcacctagtaaggaaaatgagtcaagcgacagtgaagaagaagtttccaggcctcggaagtcacggaaacgtgtagattcagattcagattcagattcagaagacgatataaattcagtgatgaaatgtttgccagaaaattcagctcctttaatcgaatttgcaaatgtgtcccagggtattttattacttctcatgttaaaacaacatttgaagaatctttgtggattttctgatagtaaaattcagaagtactctccatctgaatctgcaaaagtatatgataaagcgataaaccgaaaaacaggagttcattttcatccaaaacaaacactggacttcctgcggagtgacatggctaattccaaaatcacagaagaggtgaaaaggagtatagtaaaacagtatctagatttcaaacttctcatggaacatctggaccctgatgaagaagaagaagaaggggaggtttcagctagcacaaatgctcggaacaaagcaattacctcactgcttggaggaggcagccctaaaaataatacagcagcagagacagaagatgatgaaagtgatggggaggatagaggaggaggcacttcaggggtgaggcggaggaggagtcaacgtatttcgcagcgtattacgtaaaatgatttttatgtgcttatatatgtcagtctattaaatgtacaccaagtaatgtaatacttaaaagagaaaacattttgtagatagagattctctacttacccgtttatacatccttttgtagaaagtttaacataaaagacaataaaaaaacagaaatgagatttatccagcataaagggttaatttttctttgaattgtattaatgtgtgttatttttattgttgctaagttttatgtagctatatggttcatatgtatatataattttatatatcaataagagtaaagacacgggtacaaattaagagttatatggttttacaagtatatgttaaccccttggcgctggcggtcacggtgcgtctcattgccggcaatggaagtgtgccgggaaatcccaactcccggcgtcaagggattaaaagcaataaaaacaataatttcactaaaattcttttgtgtaacacttggtcttttttcccccctcccaatgttttagtcattgagaaggtcaaaacgaaattcagactctacggagttggcagcacagatgaatgaaagtgttgacgtcatggatgtcatcgctatttgctgtccaaagtacaaagatcgaccacaaattgcaagagtagtgcagaaaaccagcagtggcttcagtgttcagtggatggcaggctcctacagtggctcctggactgaggctaagcgccgtgatggccgcaaactggtgccttgggtagacactattaaagagtcagacattatttacaaaaaaattgctctaacgagtgctaataagctgactaataaagttgttcagactttacgatccctgtatgccgccaaggatgggacttccagctaatgaatttgtacatgcagccaaatttacaggaatttttttaaaaggcagaaaaacttgaaataccaacattctggcaaaaaaaaatcagttttatgaagagtaagtggaacctgggatgcaggaacaaaagaaggaaatgttgggcaaacatttttgtgggagctcccttcgctgttgtgcagcagaaacagattctcagttcatttttactcccactgtattatagtttaacaaaaattgtttatatcttggaaaaaaaactttctgtttaaaaaaaataaacaagtgaatgttggaaattagtctgttaatgttcttaataaagtgttcttggagtttaacctagcagcggatggctttctttagcttagcccagtttccagggaagcattgttttttccaggctgtaaaatggcagaatctcctggatatataatttattctgttgaaaaaaaaaaaagcatgcagtatctatgacctatctgcagaaggagtttttgtaaatgtagattttgatgtattaggtcaccctgaaaacaatacaagaaaagggatccccaggtaatctggtggagcgaatactgcaataaatttttttacttctctttgttacttgtctgtttccatttgaatttcttattgtaaaaatctgtttaaatccatttatattattttacagtcttttatgtaaaatttattatatcactggttttcaaagcaaaacataaaatattgtttatacagtttgtataggctgacttctgaataattggtatctattattttcattcccataagagggtgtaaacaattaactccagggttttattgtatcctgcaatatttagtattaactatatatgatttagcactgtgccaaacacattttcaagagtacattttgatataaaaagaaactatagttta

SEQ ID NO: 58 - DNA, 9841 bp, Homo sapiens
tccggtcggcattttgttctgagagggagagacggaacgagagagagacacacacagggctccttccccccgccctcccccccctccctccgtcggtaccgactcacccgacaccaccaagccgcagggagggacgcccccgccgacaggagaattggttcccgggcccgcggcgatgcccccccggtagctcgggcccgtggtcgggtgtttgtgagtgtttctatgtgggagaaggaggaggaggaggaagaagaagcaacgatttgtcttctcggctggtctccccccggctctacatgttccccgcactgaggagacggaagaggagccgtagccaccccccctcccggcccggattatagtctctcgccacagcggcctcggcctccccttggattcagacgccgattcgcccagtgtttgggaaatgggaagtaatgacagctggcacctgaactaagtacttttataggcaacaccattccagaaattcaggatgaatggggatatgccccatgtccccattactactcttgcggggattgctagtctcacagacctcctgaaccagctgcctcttccatctcctttacctgctacaactacaaagagccttctctttaatgcacgaatagcagaagaggtgaactgccttttggcttgtagggatgacaatttggtttcacagcttgtccatagcctcaaccaggtatcaacagatcacatagagttgaaagataaccttggcagtgatgacccagaaggtgacataccagtcttgttgcaggccgtcctggcaaggagtcctaatgttttcagggagaaaagcatgcagaacagatatgtacaaagtggaatgatgatgtctcagtataaactttctcagaattccatgcacagtagtcctgcatcttccaattatcaacaaaccactatctcacatagcccctccagccggtttgtgccaccacagacaagctctgggaacagatttatgccacagcaaaatagcccagtgcctagtccatacgccccacaaagccctgcaggatacatgccatattcccatccttcaagttacacaacacatccacagatgcaacaagcatcggtatcaagtcccattgttgcaggtggtttgagaaacatacatgataataaagtttctggtccgttgtctggcaattcagctaatcatcatgctgataatcctagacatggttcaagtgaggactacctacacatggtgcacaggctaagtagtgacgatggagattcttcaacaatgaggaatgctgcatcttttcccttgagatctccacagccagtatgctcccctgctggaagtgaaggaactcctaaaggctcaagaccacctttaatcctacaatctcagtctctaccttgttcatcacctcgagatgttccaccagatatcttgctagattctccagaaagaaaacaaaagaagcagaagaaaatgaaattaggcaaggatgaaaaagagcagagtgagaaagcggcaatgtatgatataattagttctccatccaaggactctactaaacttacattaagactttctcgtgtaaggtcttcagacatggaccagcaagaggatatgatttctggtgtggaaaatagcaatgtttcagaaaatgatattccttttaatgtgcagtacccaggacagacttcaaaaacacccattactccacaagatataaaccgcccactaaatgctgctcaatgtttgtcgcagcaagaacaaacagcattccttccagcaaatcaagtgcctgttttacaacagaacacttcagttgctgcaaaacaaccccagacttctgtggtacagaatcaacaacagatatcacaacagggacctatatatgatgaagtggaattggatgcattggctgaaattgagcgaatagagagagaatcagctattgaaagggagcgcttctcaaaagaagttcaagataaagataagcctttgaaaaaaagaaaacaagattcttacccacaggaggctgggggtgctacaggaggtaatagaccagcttctcaggagacgggttctacgggaaatgggtcaaggccagcattaatggttagcattgatcttcatcaggcaggaagagtggactctcaggcttctataactcaggattcagactccataaaaaagcctgaagaaatcaaacaatgtaatgatgcacctgtttctgttcttcaggaagatattgttggaagtcttaaatctacaccagaaaaccatcctgagacacctaaaaaaaagtctgatcctgagctttcaaagagtgaaatgaaacaaagtgaaagtagattagcagaatctaaaccaaatgaaaaccgattggtggagacaaaatcaagtgaaaataagttagaaactaaagttgagacccaaacagaagaacttaaacagaatgagagcagaacaactgaatgcaaacaaaacgagagcaccatagttgagcctaaacaaaatgaaaatagactgtctgacacaaaaccaaatgacaacaaacaaaataatggcagatcagaaacaacaaaatcaaggcctgaaaccccaaagcaaaagggtgaaagccggcctgagactccaaaacaaaagagtgatgggcatcctgaaaccccaaaacagaagggtgatggaaggcctgaaactccaaagcaaaaaggtgagagccgccctgaaactccaaagcaaaaaaatgaagggcgacctgaaacaccaaaacacaggcatgacaataggagggattctggaaagccatctacagagaaaaaacctgaagtgtctaaacataaacaagatactaaatctgactcacctcggttaaaatcagaacgagctgaagccttaaagcagagacctgatgggcgatctgtttctgagtcactaagacgtgaccatgataataaacaaaaatcagatgacaggggtgaatcagagcgacatcgaggggatcagtctagggttcgaagaccagaaacattgagatcctctagtagaaatgaacatggcattaaatctgatagttcaaaaactgataaactagaacgaaaacacaggcatgaatcaggggactcaagggaaagaccatcttctggggaacaaaaatcaagacctgacagtcctcgtgttaaacaaggagattctaataaatcaagatctgataaacttggttttaaatcaccaactagtaaagatgacaaaaggacagagggtaacaagagtaaagtagacactaataaagcacaccctgacaataaggcagaatttccaagttatttgttggggggcaggtctggtgcgttgaaaaattttgtcattccgaaaatcaagagggataaagatggcaatgttactcaggagacaaagaaaatggaaatgaaaggagagccgaaagacaaagtagaaaaaataggattagttgaagatctaaataaaggagctaagcctgtagttgtgctacaaaaactgtctttggatgatgttcagaaacttattaaagatagagaggacaaatcaagaagttcccttaaacctatcaagaataaaccatcaaagtcaaataaaggtagtatagatcaatcagtgttaaaagaattaccccctgaactcctggcagaaattgagtccaccatgccactttgtgaacgtgtgaaaatgaacaaacgcaagcgtagcacagttaatgaaaagccaaaatatgctgaaatcagttcagatgaagataatgatagtgatgaagcttttgaatcctctaggaaacgacataaaaaagatgatgataaagcttgggaatatgaagagcgtgacagaagaagctctggggatcataggagaagtggccactctcatgaaggaagaaggagttcaggtggtggtcgttatcgaaaccgaagtccgtcagattctgacatggaagattattctcctcctcccagccttagtgaggttgctaggaaaatgaagaaaaaagaaaaacagaagaaaaggaaagcatatgaaccaaaactaacacctgaagaaatgatggactcttcaacttttaagagattcacagcctcaatagagaatattttggataatttggaagatatggattttactgcgtttggtgatgatgatgaaattcctcaggaactgctcttaggaaaacatcagcttaatgaacttggcagtgaatctgctaaaataaaagcaatgggtataatggataagctttcaactgacaaaactgtgaaagtcttaaatatcttggagaagaatattcaggatgggtcaaagctttccactttgttaaatcataataacgatactgaagaagaagaaaggttatggagagaccttattatggagagagttacaaaatcagcggatgcttgtcttacaactatcaacattatgacatcccctaacatgccaaaagctgtgtacattgaggatgtaattgaaagagttatacagtacactaaatttcatttgcagaatacactttatcctcagtatgatcctgtttacagattagatcctcatggaggaggcttattaagttcaaaagcaaaacgggctaaatgttctacccataagcagagagtaatagtaatgctttataacaaagtttgtgacattgttagcagcttatcagaattgctagagatacaacttcttacagacacaacaattcttcaggtttcatctatgggaataacaccattttttgtggaaaatgtcagtgaactacagttgtgtgccattaagttagtcactgcagtattctcaagatatgaaaaacataggcagttaattttggaagaaatttttacttcacttgcaagattaccaaccagcaagaggagtttaaggaacttcaggttaaacagtagtgatatggatggagaacctatgtatattcagatggttacagcactggttttacaacttattcagtgtgtggtacacttaccatcatcagagaaggactctaatgcagaagaagattcaaataaaaaaattgaccaggatgttgtcattactaactcttatgaaacagctatgcgaacagcccaaaacttcctctccatcttccttaaaaaatgtggtagtaagcaaggtgaagaagattacagaccactgtttgaaaattttgttcaagaccttctttcaacagtcaataagcctgaatggccagctgctgaactactccttagtttgttagggagactgttggttcatcagttcagtaacaagtcaacagagatggctttaagagtggcatctcttgattaccttggaactgttgctgcacggctaagaaaagatgctgttacaagcaaaatggatcaaggatctatagaacgcattttaaaacaggtttcaggaggggaagatgaaatccaacaattacaaaaagcattgcttgattacttggatgaaaacactgagactgatccttcactagtgttttctcgtaaattctatatagcccagtggtttcgagacacaactctggaaacagaaaaagcaatgaaatcacaaaaagatgaagaatcatctgaaggaacacatcatgcaaaggaaattgagacaactggccaaattatgcatcgagctgaaaaccgaaaaaagtttcttagaagcattatcaaaaccacaccttctcagtttagcacattaaagatgaactctgatactgtggactatgatgatgcttgcttgattgttcgatacttggcctccatgaggccgtttgcccagagctttgatatttatttgacacagatcctacgagttcttggtgaaaatgcaattgctgttcgaacaaaagccatgaagtgtttgtctgaggttgttgctgtagaccccagtattctagcaaggcttgatatgcaacgaggtgttcatggacgattgatggataattcgactagtgtccgagaagcagcagtagaattactaggtcgatttgtcctttgtcgacctcagcttgctgaacagtattatgatatgctgattgaaagaatattggatactggtatcagtgtcaggaaaagagtaataaagattctcagagacatttgtattgaacaaccaacatttccaaaaatcacagaaatgtgtgtaaaaatgattcgcagagtcaatgatgaagagggcattaagaaattagtaaatgaaacattccagaaactctggtttactccaactccacacaatgacaaagaagcaatgacaaggaaaattttaaacattaccgatgtggttgcagcatgcagagatactggatatgactggtttgagcaactgcttcaaaacttgttgaagtccgaagaggattcctcatataaacctgtgaagaaagcttgtactcaacttgttgataacctagttgagcacattcttaaatatgaggaatctctagctgactctgacaataaaggtgtgaattctggaagattggtagcttgcataaccactttgttcttattcagcaaaataagaccccagctcatggttaaacatgcaatgactatgcaaccataccttaccactaaatgtagtacgcaaaatgatttcatggttatctgcaatgttgcaaaaatcctagagctagttgtaccactgatggagcatccaagtgaaacttttcttgccactattgaggaagatctaatgaagctcatcatcaaatatggcatgactgtagtgcaacattgtgtgagctgtcttggagctgttgtaaataaagtgacacaaaattttaaatttgtgtgggcttgtttcaatagatactatggtgccatttcaaaattaaaaagtcaacaccaagaggacccaaataacacttcacttctaacaaacaaaccagcacttcttagatcccttttcaccgttggagcactatgtcggcattttgattttgatctggaagattttaaaggcaacagcaaggttaacataaaagataaagtacttgaactattgatgtattttacaaaacactcagatgaagaagtacaaacaaaagctatcattggtctaggatttgcctttattcagcatccaagtctaatgttcgagcaagaagtgaagaatctatataataatattttatctgataagaactcctcagtcaatttaaaaatacaagtgttaaaaaacctccagacctacctacaagaagaagatacacgtatgcagcaggcagatagagactggaagaaagttgcaaaacaggaagacttaaaagaaatgggtgatgtttcctcagggatgagtagttccatcatgcagctttatctcaaacaggtgcttgaggcattttttcacacccagtcaagtgtacgccactttgccctaaatgtcattgcattgactctaaatcaaggtcttattcatccagttcagtgtgtgccatatttaattgctatgggcacagacccagaacctgctatgcggaacaaggctgatcagcaacttgtggaaatagacaaaaaatatgctggattcattcatatgaaagcagtggctggtatgaagatgtcttaccaggtacaacaggcaatcaacacatgcctaaaagatcctgtaaggggtttcagacaagacgagtcctctagcgctttgtgttcacacctttactccatgatccgtggaaaccgccaacacagacgagcctttcttatttctttactcaacctctttgatgacacagcaaaaacagacgtgactatgctcttgtatatagcagacaatctagcctgttttccataccagacacaggaagagccgttgtttataatgcatcatatagacattacactctcagtttctggtagtaacctactgcagtcattcaaggagtctatggtaaaggacaaaaggaaagagagaaaatcatcacctagtaaggaaaatgagtcaagcgacagtgaagaagaagtttccaggcctcggaagtcacggaaacgtgtagattcagattcagattcagattcagaagacgatataaattcagtgatgaaatgtttgccagaaaattcagctcctttaatcgaatttgcaaatgtgtcccagggtattttattacttctcatgttaaaacaacatttgaagaatctttgtggattttctgatagtaaaattcagaagtactctccatctgaatctgcaaaagtatatgataaagcgataaaccgaaaaacaggagttcattttcatccaaaacaaacactggacttcctgcggagtgacatggctaattccaaaatcacagaagaggtgaaaaggagtatagtaaaacagtatctagatttcaaacttctcatggaacatctggaccctgatgaagaagaagaagaaggggaggtttcagctagcacaaatgctcggaacaaagcaattacctcactgcttggaggaggcagccctaaaaataatacagcagcagagacagaagatgatgaaagtgatggggaggatagaggaggaggcacttcagggtcattgagaaggtcaaaacgaaattcagactctacggagttggcagcacagatgaatgaaagtgttgacgtcatggatgtcatcgctatttgctgtccaaagtacaaagatcgaccacaaattgcaagagtagtgcagaaaaccagcagtggcttcagtgttcagtggatggcaggctcctacagtggctcctggactgaggctaagcgccgtgatggccgcaaactggtgccttgggtagacactattaaagagtcagacattatttacaaaaaaattgctctaacgagtgctaataagctgactaataaagttgttcagactttacgatccctgtatgccgccaaggatgggacttccagctaatgaatttgtacatgcagccaaatttacaggaatttttttaaaaggcagaaaaacttgaaataccaacattctggcaaaaaaaaatcagttttatgaagagtaagtggaacctgggatgcaggaacaaaagaaggaaatgttgggcaaacatttttgtgggagctcccttcgctgttgtgcagcagaaacagattctcagttcatttttactcccactgtattatagtttaacaaaaattgtttatatcttggaaaaaaaactttctgtttaaaaaaaataaacaagtgaatgttggaaattagtctgttaatgttcttaataaagtgttcttggagtttaacctagcagcggatggctttctttagcttagcccagtttccagggaagcattgttttttccaggctgtaaaatggcagaatctcctggatatataatttattctgttgaaaaaaaaaaaagcatgcagtatctatgacctatctgcagaaggagtttttgtaaatgtagattttgatgtattaggtcaccctgaaaacaatacaagaaaagggatccccaggtaatctggtggagcgaatactgcaataaatttttttacttctctttgttacttgtctgtttccatttgaatttcttattgtaaaaatctgtttaaatccatttatattattttacagtcttttatgtaaaatttattatatcactggttttcaaagcaaaacataaaatattgtttatacagtttgtataggctgacttctgaataattggtatctattattttcattcccataagagggtgtaaacaattaactccagggttttattgtatcctgcaatatttagtattaactatatatgatttagcactgtgccaaacacattttcaagagtacattttgatataaaaagaaactatagttta

SEQ ID NO: 59 - DNA, 9286 bp, Homo sapiens
gtgcactcggctccgggagaggcgagcagcgccggtgagccccgcagcagcgcacccggccgcggagccccgcgatggagatggcagaggcggaattgcacaaggaaaggctgcaagccatagcagaaaaaagaaagaggcagactgaaatagaaggcaagcgacaacagcttgacgagcagatacttctgctgcagcattccaagtccaaagtgcttcgggagaaatggctgctgcagggcatacccgctggaactgccgaagaggaggaagccaggaggcggcagtctgaagaggatgagttcagagtcaagcaacttgaagataacattcagaggctggagcaagaaatacaaacgctagaaagtgaagagtcccagatatctgccaaagagcaaatcatcctagagaaactgaaggaaacagaaaaatccttcaaggactttcagaagggtttctccagtacggatggagctgtgtacgccatggaaattaatgtggagaaagacaaacaaacaggagagaccaagattctctctacatctaccattggcccagagggggtccatcagaaaggagtcaaagtctatgatgatggtaccaaagtagtgtatgaggtgcgctcaggaggcaccgtagtagaaaatggagtgcacaaattaagcacaaaggatgtagaagagcttattcagaaggctggacaatcaagcttaggaggagggcacgtgtctgaaaggactgtgattgcagatgggagcctcagccatcccaaggaacacatgctctgcaaagaagctaagttagaaatggtacataagtctaggaaagaccattcttccgggaacccagggcagcaggcccaagcccccagcgctgcagggccggaggcaaacttggatcagcccgtcaccatgatttttatgggctaccaaaatatcgaggatgaagaggagacgaaaaaggtgctaggctatgatgaaaccatcaaggctgaattggtcctcattgatgaagatgatgagaagtcattgagggagaagacagtgacggacgtgtccactattgacgggaacgcggctgagcttgtgtccgggaggccggtctcagacaccacagagccctcatccccagaagggaaggaagagagcctagctacagagccagccccaggtacccaaaagaaaaagcgctgtcaatgctgtgttgtcatgtgaccacttctttcttctcctttcttctgggcagcctgtactctccaccactcacgtagacctcactgtaccactaactgcaatactgtgaactggaagcaaacacctgccttgccttgcagttgaattgctttgatctctctcattttttttccttttcctcacctgagagacaacgtgcatgtgtgtgcttcattctctccaagaacttgcttttcctctaaacctttccttgtgtcttcaagagtgaatcacttccttcctgctcgattggaatggactcttcgtatcagccagtgatatggtagccttaactcacttgactggaattgaacccattggcactgggggtttcattttgtagtgtgttcctgtaacgtagtcacacactgccatgtctctggtttctcacttgcctcctttgctgtggatctttgtttttatatcttgtgtggcaaaatgctgttggctctagccggttgctagtgtagccaaaagtggaccttacttagtctgtccgatctagggtgatgctttttgctgccttacataagcttccagattacagtattgtgcattcatggctttctttctgttaaaactgaaatgaagtcaatgtagaagaacccagagcttgtcacagctgaaatgtagggactgattccataacctgcccatcagcggttgtctctctttctatggtttaaccgatgaaccctttatataagaagcaccattttaaaatttctaaggacatgaaacaaacattgtttgaagcatcagtagcaattgatctccaaacttaggcaaattcacaagccttgtttctattctcttaaaaaaatgtaaatttttatattgtttcttttttctggatattttctggtcatgttaatctattttcaatgaggagatcatcttgagaagtatctttgcagtgaccatatttctaaaacagtctgtccaacctacaatggttgccatgatgctcccacttcatcatggatggtgctgtaatgcattaactgttcatctcctccccagttgattacaaagccttgcatccatactcttttctttctggccccatgagaaagagaatgttttaggtaacttcaacttgtaggtttatctgcccttcaaaaaaaaaaactttaaaaaacttttaaaaattaagaaagacctatcttctcaatgttaagcacttaatttcataacaaatattaagtggcacatagctgagcttcttagggcattgttttgtttttagcttctggagattccagaagagcaaagaatattttttatctagaacacaatgaacagtttttgaaataccttctcagcactcccccaaagcaaaaagccacatatgtagtaaaaccaaagggaaacaatttaataaaataacaatagtatagtaatgaaataaagatataacatgattactggttttaataagagttatcttaactttaagttatttgcccatttatagcattgttatgaattattcataaaattatgtcccacagtatatagttttgaaaaaacatatgatatactacatccagtctaacttctgtggaaagtagatcagaaaaaataagatagtcttgagagaattttattatagaagctgtctaatttgacctattttgcttgctcagtgctaaatctattgcttttttttaatctcctggcttgaaattatatttacttcaataggaaaggtaaaaacatcagtttttacttttcaaagttaattttctgaaataattgcattttaatgagcacaaaatgggtcattttatttttattatactcatcttgtttacacctatacataaacagaaaacgttaaagaagagaaaaataaaggagctaagttctgctgttgaagattatttcatccaaggcttggttttgaataactgagggaaatatctctaaatctcaagttcatcaaagcagctgcaatggaataaaattgctattttatcgagaaacctggtttggatgcttataaattccactactctcagcttcattttcctgagtacgtggtcactgaagcatcatttagacattacataaactggcatgcagataaacctatttacatagagggagaaaacagtttcaatgtcttggacaatctgttattttaatgatttacttaagaaagaaacaatctgaaagcttaccatagcttatcttttctactcacttggagattcaagctattcaatgtgagttttaaaaagttaagcacagttagtgagtgaaatggtagaatgtagaacctttaagcttgctggttgataaacagaatcaatcttccaggacagataattccctgaagggacctatccttgcataagtgaactagttactcatacagaaaatgatctgcacatcttactacaacactacacacaagaactaaaagattaatgattatctgtattctcttcactaattactattatgggggaataatgattagcaaattatatgaattcgagttctctctatacttttattagtaaagcttatcatttaatggactgaagtaagatgtgttacctttattcgagctatttgtagccacactaaatgaaggtgtgtttgaatatggcgcatatatttgcatatgtcccatcattttcttgtcataatggggaattcaggcttagccagtacttctatgggatgagacctataatcccacctatagcagcaagtaactacccttcatgatgatagtgtacatggagctgtgattatgaacatgctgcctttcctgctgccattggcattctctctgtaaattttattatgtgtggtatcacactctccaaaaatgcagggtatttggttacataaccaaactaattaaagaatcagtaatgaaattgcaaaaccatgatcttttttgagctaatgattagttgggctttcctttaaaataatataatcaggccgagtgcagcggctcacacctgtaatctcggcactttggaagtccgcggcgggtggttcacctgaggtcgggagttcaagaccagcctgaccaacatggagaaacccccatctctactaaaaaaaaaatacaaaattagccaggcgtgatggcgcatgcctgtaatcccagctactcgggagactgaggcaggagaatcgcttgaacctgggaggcaggggttgcaatgagccgagatgtgcactccagcctgggcaacaaagagcgaaactccatctcaaaaaaaaaaaaaaaaaaaaaaaaatcatataatcagttcccttttaaatagaaagaggaggaaaaaaaaaaggaaaagggggggtatctcatttgtatacaaatagattttcaatggcatttaataaaagattctttaatggttaaaatgataaagattaattctacatatcttgaaaaatcttaatgacttctgtattcttgacttcttaaaaatattttctttcttttagtgtgcaataagacaaactaaggggaattttttcagcttgtatctcttttacccatattattttccttgcataagcaaaaaaataataattgcctctaaaactgatttgacagtgttcagtgacatcatttaatattggtgatggggtggaagagaaggtagggaatgcccttatggccaaacctaaaacacagtttccttgagccttctgagcaatcttagaattattcagaagctttcaggaaactcaaattctattaatttgatttggttcctttccaaaatgttaatagacatgtatttgcttaaaacgtctacctattccatttaatttcctgctgataaatgtattttatctacaagcaagtagaatattttgttttggttaaagtcaagtttttataaaaggaggggaagtataagagagagtttcctagagatacaatatcatctctggagcaaaatgttgaggccaagtgtaaaaacagactatttctctttacttcctgcagaatttcatttcaagggaccacagcacacccttgaaaattaccatttatttaatgccagttgaaccaatgggtagcaaaagaggagggagggaacatggtcatagagacaaaatctaactactataccaggtcttcctttgtaagaaatattagccctgccaatataaaacgcagatggacatagacagaataagcatcgaggactttttcttatttacttgaaatctagaagctcagtcatctctgctcatccctggacccactggagagttttactcactaacaggtcctttcctggaagaaataacctcatctcctgccatattagtttacaataaaaatcattccaaagtgagccatttcacattgcatttttgccacatgcacatttgctattgaaaccacagattctcagcataagtaagacataggtgtttcagaaacttcataaatacacgatctttcaggtgctcctcaatttcttaatcaaggtatattgaactccagtgattaggatagaacctgaaaacatcctttgttctattggatagtacaacacagcaagagcacacagttatttgtataataaaacaacttaattaatgaggaagatgggatgtttgattcctgctaccaccagttcacttcacaaaggccttcttctggtattaccaggaaaactttcctgcattttctagggaaaaagaaaagtcgtttattaggagcacaatgcagatatgtatctgtgttttcatagcttcagcaaacttcttagtaaaattcccatttcaacaaaaaccaaaatactgattgtttgaatgtagaaaggtatagaataaagactacaaaggggaattttaccagggctccttagaccagcttccccagcataatttttatataactcaagtaagcctctgcttcccctctcctttccagtataatataagaaggtcggaactgtcgcacaaaagaacttgatttcaatatgaaaatataatatgtaattttggggactgcagactttctgcatcaaagatctggacagccttaacttttataaaaataatttttcaatgttctcttttactaaccaggaaaacaagatgttttctgaaattaatgactttttctattttgggtctgttttctaagtttttacaggttgaggtataaagggtcgtcttctcctcatattgcctcttcataatcacctggggctattttttgcaagtcactgcatttttacaaaaaataaaaataaaaagtacatctcacaaatcataaaattctccctagacttcagacagtccttctggagtgaaagaatagaaatacagaaagaaaagaattacagggtggctttctttttattttcctatggttaatgtactgtatggtatatatgtttacagaatgtatctgccttgtgatgttaacaaaatgaatgacaaaaaatagtactgatgtgccatttgacagtttgccttagcatcactgtttatgttcttcttttctgtcctttttggtaaaaaaaaacgcaggttgtattccaaagctgtattaacacaacattctcttccccactcctacccagccttcttcagagctgtgaatttcattacaggagcattgaggcagaaccttgcaggtgtggcccaaaggggctaaagtgggcataggttgggatttacttctgcccgtctaccaaccaaacacgtatctgtgttctcatataagcctgcaaaattttacaccctgcctttcagggagacaggccacatggagcgcatgacctcttgtagtcgtctcctcacagtccttcccactgtgagagaaggaaacttgcagacccccaactggatctgggagcatatttttaagcacagttggcattgcttgaaaaagcaagagagatggactcaaattctatgattgagccatgactgaggaatgtgcccattcgttatagtcgaagatgagtaggatgatatgggtgagaataggagtggctgtagaaatggaatattttacagttatgtatttttttaaggaatagtatttttataatgaaatctatatacattatggagcttgagttggaaaacacccttgactgagctatttcttcattccattaaaggtaactttctggggagtcctatagcactaggccaagccttgggggcatgaacaaagggcctgtcacttggccttgcactgccattacatgagatccagtgtttccaaataggccttggttggaagattgagctttctatacctgccattaggtagattagatagatggcttgatagctctctgggctatacttttaataatatataataatctttgggaaggagatagctattttaaatgcaagcaaagcccagaaactatcaaagtccaaatctttcacatatttaaggagtaattgccacatttgaggttaagggaccacttactatggtgcatttgagaaatatatatgaaacggtgagtcagagccctctgaccatcttcagtctacacataagcagataaaccaccaatataaatcttataggggccagacgaggtggcttatgcctgtaatcccagcactttggggggccaaggcaggaggatagtgtgagcccagaagttcaagaccaggctaggcaacatgttgagaccatgttgtttagtctctactaaaaaatataaaaattagccagcatggtggcacacacctgtagtcccagctacttgggagactgaggcaggaggatcacttgagcccaggaggtggaggctgcagggggctgagatctcaccactccattccagcctgggcaacagagcaagactctgtctcaaaaaaaaaaacaaaaaaacaattatcagttggccttctacataacacagggctacactgtatttttagagttaagtagatacaggaaaagattgtctttatccataaaggagattctgaatttttagagttcctgaatattttcccccaagtttctgtcaaattcctgaagtcccttccctatcacactcagtttcctgaagctcttcccctacacctgctcctctgtctggctaacagagttgtcatgtctcagaaactactcaccactcttgtgagactctcttcccaagcatcatccttcctcaggatgaggcctttttctactacccaagagatcaagaccctttttctaacaagacaaggttatatctactccattttcaagagaaataacccctctggttcccatgcaaatcgcttaaattccttcatcaccagaatctctccaacaggcccaactccagcccagctgtgaacactgctgtcatggagacaactccaaaatgaaagaactatgcaattgcctgaaggtgctaatggagagccagtttactctaatctcttattactaaggaacctctcggtttcgagattaagtgggcagggagacatccagtcacttagttttgcaatgacaggtcttgatatacacagaggccaccaggcaatgcctgatccaaactattctgtatgtagctccaactccaattctgtgatatcctattctggcaggtgggaagagttctattctttgcagggttctggaacattctttcctgctctcaagctcctgacttaggagagtcaaaatcatacaggggttccagaaaatgttgtgtctgatgcagcttctcagtgaatgtaggttgttggtgaaattttcagctttagcatctcactcggggtgagtgatgtctctgtaaatactttcatttgtggttggttggtgggggtgggggtgggagcctgtcgtgcttactctgaattagcttactgggctagctgctgtactttgtaacctgaagtgtactttgactgttctgtttccttcagatgaaaaacaaaataaaaaccgacttcagaaaagacactaccagcgacagctgatgctgtacttgtagcttctctctgttcctctgtacagtattaatagacaataaactgccttttcactgcatctaaaaaaaaaaaaaaaaaaaaaa

SEQ ID NO: 60 - DNA, 9500 bp, Homo sapiens
ccagaggctgagcccgggcgagcccgccgtgcgcacagctctgcccgccgcccctggagcggatccccagccgtccctgggcgttctcccgggttctagcaaagccccccggggtgcccatcagtttccttgggtgactacagcgtgtgttttttctttcctctttcccctgcctgtgtgcccttctccaggatggcagaggcggaattgcacaaggaaaggctgcaagccatagcagaaaaaagaaagaggcagactgaaatagaaggcaagcgacaacagcttgacgagcagatacttctgctgcagcattccaagtccaaagtgcttcgggagaaatggctgctgcagggcatacccgctggaactgccgaagaggaggaagccaggaggcggcagtctgaagaggatgagttcagagtcaagcaacttgaagataacattcagaggctggagcaagaaatacaaacgctagaaagtgaagagtcccagatatctgccaaagagcaaatcatcctagagaaactgaaggaaacagaaaaatccttcaaggactttcagaagggtttctccagtacggatggagatgcagtaaattacatttcctcccagcttcccgacctgccaatcctctgttcacgaacagcagaaccatcacctgggcaggacgggaccagcagagcggctgctgtgtacgccatggaaattaatgtggagaaagacaaacaaacaggagagaccaagattctctctacatctaccattggcccagagggggtccatcagaaaggagtcaaagtctatgatgatggtaccaaagtagtgtatgaggtgcgctcaggaggcaccgtagtagaaaatggagtgcacaaattaagcacaaaggatgtagaagagcttattcagaaggctggacaatcaagcttaggaggagggcacgtgtctgaaaggactgtgattgcagatgggagcctcagccatcccaaggaacacatgctctgcaaagaagctaagttagaaatggtacataagtctaggaaagaccattcttccgggaacccagggcagcaggcccaagcccccagcgctgcagggccggaggcaaacttggatcagcccgtcaccatgatttttatgggctaccaaaatatcgaggatgaagaggagacgaaaaaggtgctaggctatgatgaaaccatcaaggctgaattggtcctcattgatgaagatgatgagaagtcattgagggagaagacagtgacggacgtgtccactattgacgggaacgcggctgagcttgtgtccgggaggccggtctcagacaccacagagccctcatccccagaagggaaggaagagagcctagctacagagccagccccaggtacccaaaagaaaaagcgctgtcaatgctgtgttgtcatgtgaccacttctttcttctcctttcttctgggcagcctgtactctccaccactcacgtagacctcactgtaccactaactgcaatactgtgaactggaagcaaacacctgccttgccttgcagttgaattgctttgatctctctcattttttttccttttcctcacctgagagacaacgtgcatgtgtgtgcttcattctctccaagaacttgcttttcctctaaacctttccttgtgtcttcaagagtgaatcacttccttcctgctcgattggaatggactcttcgtatcagccagtgatatggtagccttaactcacttgactggaattgaacccattggcactgggggtttcattttgtagtgtgttcctgtaacgtagtcacacactgccatgtctctggtttctcacttgcctcctttgctgtggatctttgtttttatatcttgtgtggcaaaatgctgttggctctagccggttgctagtgtagccaaaagtggaccttacttagtctgtccgatctagggtgatgctttttgctgccttacataagcttccagattacagtattgtgcattcatggctttctttctgttaaaactgaaatgaagtcaatgtagaagaacccagagcttgtcacagctgaaatgtagggactgattccataacctgcccatcagcggttgtctctctttctatggtttaaccgatgaaccctttatataagaagcaccattttaaaatttctaaggacatgaaacaaacattgtttgaagcatcagtagcaattgatctccaaacttaggcaaattcacaagccttgtttctattctcttaaaaaaatgtaaatttttatattgtttcttttttctggatattttctggtcatgttaatctattttcaatgaggagatcatcttgagaagtatctttgcagtgaccatatttctaaaacagtctgtccaacctacaatggttgccatgatgctcccacttcatcatggatggtgctgtaatgcattaactgttcatctcctccccagttgattacaaagccttgcatccatactcttttctttctggccccatgagaaagagaatgttttaggtaacttcaacttgtaggtttatctgcccttcaaaaaaaaaaactttaaaaaacttttaaaaattaagaaagacctatcttctcaatgttaagcacttaatttcataacaaatattaagtggcacatagctgagcttcttagggcattgttttgtttttagcttctggagattccagaagagcaaagaatattttttatctagaacacaatgaacagtttttgaaataccttctcagcactcccccaaagcaaaaagccacatatgtagtaaaaccaaagggaaacaatttaataaaataacaatagtatagtaatgaaataaagatataacatgattactggttttaataagagttatcttaactttaagttatttgcccatttatagcattgttatgaattattcataaaattatgtcccacagtatatagttttgaaaaaacatatgatatactacatccagtctaacttctgtggaaagtagatcagaaaaaataagatagtcttgagagaattttattatagaagctgtctaatttgacctattttgcttgctcagtgctaaatctattgcttttttttaatctcctggcttgaaattatatttacttcaataggaaaggtaaaaacatcagtttttacttttcaaagttaattttctgaaataattgcattttaatgagcacaaaatgggtcattttatttttattatactcatcttgtttacacctatacataaacagaaaacgttaaagaagagaaaaataaaggagctaagttctgctgttgaagattatttcatccaaggcttggttttgaataactgagggaaatatctctaaatctcaagttcatcaaagcagctgcaatggaataaaattgctattttatcgagaaacctggtttggatgcttataaattccactactctcagcttcattttcctgagtacgtggtcactgaagcatcatttagacattacataaactggcatgcagataaacctatttacatagagggagaaaacagtttcaatgtcttggacaatctgttattttaatgatttacttaagaaagaaacaatctgaaagcttaccatagcttatcttttctactcacttggagattcaagctattcaatgtgagttttaaaaagttaagcacagttagtgagtgaaatggtagaatgtagaacctttaagcttgctggttgataaacagaatcaatcttccaggacagataattccctgaagggacctatccttgcataagtgaactagttactcatacagaaaatgatctgcacatcttactacaacactacacacaagaactaaaagattaatgattatctgtattctcttcactaattactattatgggggaataatgattagcaaattatatgaattcgagttctctctatacttttattagtaaagcttatcatttaatggactgaagtaagatgtgttacctttattcgagctatttgtagccacactaaatgaaggtgtgtttgaatatggcgcatatatttgcatatgtcccatcattttcttgtcataatggggaattcaggcttagccagtacttctatgggatgagacctataatcccacctatagcagcaagtaactacccttcatgatgatagtgtacatggagctgtgattatgaacatgctgcctttcctgctgccattggcattctctctgtaaattttattatgtgtggtatcacactctccaaaaatgcagggtatttggttacataaccaaactaattaaagaatcagtaatgaaattgcaaaaccatgatcttttttgagctaatgattagttgggctttcctttaaaataatataatcaggccgagtgcagcggctcacacctgtaatctcggcactttggaagtccgcggcgggtggttcacctgaggtcgggagttcaagaccagcctgaccaacatggagaaacccccatctctactaaaaaaaaaatacaaaattagccaggcgtgatggcgcatgcctgtaatcccagctactcgggagactgaggcaggagaatcgcttgaacctgggaggcaggggttgcaatgagccgagatgtgcactccagcctgggcaacaaagagcgaaactccatctcaaaaaaaaaaaaaaaaaaaaaaaaatcatataatcagttcccttttaaatagaaagaggaggaaaaaaaaaaggaaaagggggggtatctcatttgtatacaaatagattttcaatggcatttaataaaagattctttaatggttaaaatgataaagattaattctacatatcttgaaaaatcttaatgacttctgtattcttgacttcttaaaaatattttctttcttttagtgtgcaataagacaaactaaggggaattttttcagcttgtatctcttttacccatattattttccttgcataagcaaaaaaataataattgcctctaaaactgatttgacagtgttcagtgacatcatttaatattggtgatggggtggaagagaaggtagggaatgcccttatggccaaacctaaaacacagtttccttgagccttctgagcaatcttagaattattcagaagctttcaggaaactcaaattctattaatttgatttggttcctttccaaaatgttaatagacatgtatttgcttaaaacgtctacctattccatttaatttcctgctgataaatgtattttatctacaagcaagtagaatattttgttttggttaaagtcaagtttttataaaaggaggggaagtataagagagagtttcctagagatacaatatcatctctggagcaaaatgttgaggccaagtgtaaaaacagactatttctctttacttcctgcagaatttcatttcaagggaccacagcacacccttgaaaattaccatttatttaatgccagttgaaccaatgggtagcaaaagaggagggagggaacatggtcatagagacaaaatctaactactataccaggtcttcctttgtaagaaatattagccctgccaatataaaacgcagatggacatagacagaataagcatcgaggactttttcttatttacttgaaatctagaagctcagtcatctctgctcatccctggacccactggagagttttactcactaacaggtcctttcctggaagaaataacctcatctcctgccatattagtttacaataaaaatcattccaaagtgagccatttcacattgcatttttgccacatgcacatttgctattgaaaccacagattctcagcataagtaagacataggtgtttcagaaacttcataaatacacgatctttcaggtgctcctcaatttcttaatcaaggtatattgaactccagtgattaggatagaacctgaaaacatcctttgttctattggatagtacaacacagcaagagcacacagttatttgtataataaaacaacttaattaatgaggaagatgggatgtttgattcctgctaccaccagttcacttcacaaaggccttcttctggtattaccaggaaaactttcctgcattttctagggaaaaagaaaagtcgtttattaggagcacaatgcagatatgtatctgtgttttcatagcttcagcaaacttcttagtaaaattcccatttcaacaaaaaccaaaatactgattgtttgaatgtagaaaggtatagaataaagactacaaaggggaattttaccagggctccttagaccagcttccccagcataatttttatataactcaagtaagcctctgcttcccctctcctttccagtataatataagaaggtcggaactgtcgcacaaaagaacttgatttcaatatgaaaatataatatgtaattttggggactgcagactttctgcatcaaagatctggacagccttaacttttataaaaataatttttcaatgttctcttttactaaccaggaaaacaagatgttttctgaaattaatgactttttctattttgggtctgttttctaagtttttacaggttgaggtataaagggtcgtcttctcctcatattgcctcttcataatcacctggggctattttttgcaagtcactgcatttttacaaaaaataaaaataaaaagtacatctcacaaatcataaaattctccctagacttcagacagtccttctggagtgaaagaatagaaatacagaaagaaaagaattacagggtggctttctttttattttcctatggttaatgtactgtatggtatatatgtttacagaatgtatctgccttgtgatgttaacaaaatgaatgacaaaaaatagtactgatgtgccatttgacagtttgccttagcatcactgtttatgttcttcttttctgtcctttttggtaaaaaaaaacgcaggttgtattccaaagctgtattaacacaacattctcttccccactcctacccagccttcttcagagctgtgaatttcattacaggagcattgaggcagaaccttgcaggtgtggcccaaaggggctaaagtgggcataggttgggatttacttctgcccgtctaccaaccaaacacgtatctgtgttctcatataagcctgcaaaattttacaccctgcctttcagggagacaggccacatggagcgcatgacctcttgtagtcgtctcctcacagtccttcccactgtgagagaaggaaacttgcagacccccaactggatctgggagcatatttttaagcacagttggcattgcttgaaaaagcaagagagatggactcaaattctatgattgagccatgactgaggaatgtgcccattcgttatagtcgaagatgagtaggatgatatgggtgagaataggagtggctgtagaaatggaatattttacagttatgtatttttttaaggaatagtatttttataatgaaatctatatacattatggagcttgagttggaaaacacccttgactgagctatttcttcattccattaaaggtaactttctggggagtcctatagcactaggccaagccttgggggcatgaacaaagggcctgtcacttggccttgcactgccattacatgagatccagtgtttccaaataggccttggttggaagattgagctttctatacctgccattaggtagattagatagatggcttgatagctctctgggctatacttttaataatatataataatctttgggaaggagatagctattttaaatgcaagcaaagcccagaaactatcaaagtccaaatctttcacatatttaaggagtaattgccacatttgaggttaagggaccacttactatggtgcatttgagaaatatatatgaaacggtgagtcagagccctctgaccatcttcagtctacacataagcagataaaccaccaatataaatcttataggggccagacgaggtggcttatgcctgtaatcccagcactttggggggccaaggcaggaggatagtgtgagcccagaagttcaagaccaggctaggcaacatgttgagaccatgttgtttagtctctactaaaaaatataaaaattagccagcatggtggcacacacctgtagtcccagctacttgggagactgaggcaggaggatcacttgagcccaggaggtggaggctgcagggggctgagatctcaccactccattccagcctgggcaacagagcaagactctgtctcaaaaaaaaaaacaaaaaaacaattatcagttggccttctacataacacagggctacactgtatttttagagttaagtagatacaggaaaagattgtctttatccataaaggagattctgaatttttagagttcctgaatattttcccccaagtttctgtcaaattcctgaagtcccttccctatcacactcagtttcctgaagctcttcccctacacctgctcctctgtctggctaacagagttgtcatgtctcagaaactactcaccactcttgtgagactctcttcccaagcatcatccttcctcaggatgaggcctttttctactacccaagagatcaagaccctttttctaacaagacaaggttatatctactccattttcaagagaaataacccctctggttcccatgcaaatcgcttaaattccttcatcaccagaatctctccaacaggcccaactccagcccagctgtgaacactgctgtcatggagacaactccaaaatgaaagaactatgcaattgcctgaaggtgctaatggagagccagtttactctaatctcttattactaaggaacctctcggtttcgagattaagtgggcagggagacatccagtcacttagttttgcaatgacaggtcttgatatacacagaggccaccaggcaatgcctgatccaaactattctgtatgtagctccaactccaattctgtgatatcctattctggcaggtgggaagagttctattctttgcagggttctggaacattctttcctgctctcaagctcctgacttaggagagtcaaaatcatacaggggttccagaaaatgttgtgtctgatgcagcttctcagtgaatgtaggttgttggtgaaattttcagctttagcatctcactcggggtgagtgatgtctctgtaaatactttcatttgtggttggttggtgggggtgggggtgggagcctgtcgtgcttactctgaattagcttactgggctagctgctgtactttgtaacctgaagtgtactttgactgttctgtttccttcagatgaaaaacaaaataaaaaccgacttcagaaaagacactaccagcgacagctgatgctgtacttgtagcttctctctgttcctctgtacagtattaatagacaataaactgccttttcactgcatctaaaaaaaaaaaaaaaaaaaaaa

SEQ ID NO: 61 - DNA, 2014 bp, Homo sapiens
aggcggcttttggtcacaggctcccgagttctcctagctggggctgcggagctggggggagggaagagaggaaaggggagggggtgcctggagaggcggaggctcgcgcgcctgcgcatccagctccagggaccctaggttttctatgggattcccaatctgcagcagagatttacccgagcgtgttgcggcagcggctgggcttgcaaggcgcgatccaagagggatttaagcagcccagagctccagagaaaaagagagcgagagagaaccacacacagagacggcttaagcgtttacccgaattaaatatatatttttaaaaagaactgttgagttttatcattttcgttaagtgaccgtgcgcagcgctgtaactgcaggatggggaagcagaatagcaaactggcccctgaagtgatggaggacctggtgaagagcacagagtttaatgagcatgaactcaagcagtggtacaaaggatttctcaaggactgtccaagtgggaggctaaatctcgaggaatttcagcagctctatgtgaagttctttccttatggagacgcctccaagtttgcccagcatgccttccgaaccttcgacaagaatggggacggcaccattgacttccgagagttcatctgcgctctgtccatcacctccaggggcagctttgagcagaagctgaactgggccttcaatatgtatgacctggatggtgatggcaagatcacccgagtggagatgctggagatcatcgaggctatctacaaaatggtaggcactgtgatcatgatgaaaatgaatgaggatggcctgacgcctgagcagcgagtagacaagattttcagcaagatggataagaacaaagatgaccagattacactggatgaattcaaagaagctgcaaagagcgacccttccattgtattacttctgcagtgcgacatccagaaatgagctgatgtcaatgctatggactgcacaaaagtctcaatgttccattcagtctgcagctattcacacacacacacacacacacacacacacacacacacacacacacaaatattgcttggactacctataaatggacttgcttcttgtgtttgaaacactcgtgtgcatgagaatgtcatttgctaatgaattttaaaagcatatataaaacaaaacaaacaacctgccacaatgtgatatgtgtaatatcatttcataaaaatccctcttcctccaaagcctgggcagaaatgtgctgcaaagagttatatgacttcttgttcatgttttgctaatgctcgtatctccttgattacataatgttagtagcactgagacccccatggtaatgtaacttaattataagctatgtcactaccctcctgtaaaatactattggacagacacagagggacccttggctcctgtgtctggtccacacaccacagaagcttgtattatcagtgaatataaatgtactacatttgcatgccttttgggtttgccttaattcttacctcatttgcatcctatcgatctggaaagagctgttttggatgaatgcagtataaaatgtaaaaaccctgctaaatgacttattgattaagtatatctatctatatatacatatacacaaagatattatttatcgaaagtaaaaaagatggaagtgtattggtttctgtttgaattttcaaaggcttccaatgtggtggcaataaatgtcccaaataaatttataacaattgattttccccctaattcttattttataattttaaaattgcagcagttgctagcaacaacttactaaatctactcttaaatatacaactttggaatttgaagaattaatgacaacaaaagggaaaaaagcaactttccaacttttcatccaggctcccaaaagagggacaacgaacatggcatgtgaaaagtaaaacagatttgttcattccgaaaaaaaaatgttcattctatgacaataaattttatctcagtgtgaaaaaaaaaa

SEQ ID NO: 62 - DNA, 8822 bp, Homo sapiens
cgcgaacagcgtttcctgaggcacctcccgcgcgtggttccgccgcgccccgcgccctgcgcccctcagcccctcgccggcgcccgcgtcgcgggttggcagcctagcccggcagccgcgttcccgccgcgtcccgcgcccggtacctatggaggcgccgctcgccggcgaggccgccgaccatgcctaggagggccgggagcggtcagctgccgctgccccggggctgggaggaggccagggactacgacggcaaggtcttctacattgaccacaacaccaggaggaccagctggatcgacccccgggacaggttaacgaagcccttgtcatttgctgattgtgttggggatgagctgccgtggggatgggaagcagggtttgaccctcagattggtgtctactacatcgatcacatcaacaaaaccacgcagatagaagatccaagaaaacaatggaggggggaacaggagaagatgctcaaggactacctctctgtggcacaggatgccctccggacacagaaggaactgtaccatgtgaaggagcagaggctggcgctggccctggatgaatacgtgcgattaaatgatgcctataaggaaaagtcaagttctcacacaagcttattctcaggatcttcatccagtactaaatatgatcccgatattttaaaagctgagatctccactacaagattaagggttaaaaagctaaagagagagctctcacagatgaagcaggaactgctctataaagaacaaggctttgaaacattgcagcaaattgataaaaaaatgtctggaggccagagcgggtatgaactcagtgaagccaaagccattctaacagaactaaaatctatcagaaaggcaattagctcaggagaaaaagaaaaacaagatctgatgcagagtcttgctaagctgcaggagcggtttcatttggatcagaacattggcagatctgagccagatttgagatgtagtcctgtgaactctcatttatgtctctccagacagacccttgatgctgggtcacaaacaagcatttccggagatattggagtaagaagtagatcaaatttagctgaaaaggtcaggctaagcctacagtatgaagaagccaaaagaagtatggccaacttaaaaattgaactgtcaaaattggacagtgaggcctggcctggggcactggatattgagaaggaaaaactgatgctgattaatgaaaaagaagaacttttgaaagagcttcagttcgtcaccccacagaaacgtacccaagatgaattagaacgcctagaagctgaaaggcagcggctggaagaagagttgctgtctgtgaggggaacaccaagcagagctctggccgagagattgagattggaagagagaagaaaagagctgctacagaaacttgaagaaactactaaattaactacttatttgcattcacaacttaaaagcctctctgccagcaccctgtccatgtcatctgggagcagcctgggttccctggcatcgagtcggggctctctgaacacctccagcagagggtcactcaactccctcagttccaccgaactctattacagcagtcaaagtgatcagatagatgtggattatcagtataaactggacttccttctgcaagagaaaagcggttacattccttctggacccatcaccaccatccatgaaaacgaggtggtcaagtcccctagccagcctggccagagtggactctgtggagtggcagctgcagcaacaggccacactcctccactggctgaggccccgaagtctgtggcctccctgtcctcgaggtcctccctttcctccttgtctcctccaggctctcccttggttttggaaggcacgtttcccatgtcttcttctcatgatgcctctctccatcagttcactgctgactttgaagactgtgagttgagtagccattttgcagatatcagcctcatcgaaaatcagattttgctggattctgattcaggaggagcctcccagtctctttcagaggataaagaccttaatgaatgtgctagggagccattatatgaaggaactgcagatgtggaaaaatcattaccaaaaagaagagtgatccacttgcttggggagaaaaccacttgtgtgtcggctgctgtgtctgatgagtctgtggctggagacagtggggtctatgaagctttcgtgaaacaacctagtgaaatggaagatgtcacatacagtgaagaggatgtagccattgtagagaccgcccaggttcagataggactcagatacaatgcaaaaagttcaagtttcatggtgattatagcacagctccgaaaccttcatgccttcttgatacctcatacttcaaaagtatattttagggttgccgttcttccttcctcaactgatgtcagctgtctgtttcgcacaaaagttcatccgcccacagaatccattttattcaatgatgtgttcagagtcgccatttcccaaacagccttacaacagaagacactgagggtagacctttgctctgtcagtaaacaccgaagggaagaatgcctggctggaactcagatcagcctggcagatttaccattttccagtgaggttttcactctatggtataacttgcttccttccaagcaaatgccttgcaaaaagaatgaagaaaatgaggactctgtatttcaaccaaaccagccgttagtagattctatagacttggatgcagtgtcagccttacttgcaagaacatcagctgagttgttagctgtggaacaagaattagcacaagaagaagaagaagaatcaggacaagaagagccaaggggcccagatggagactggctaacaatgctaagagaggcctctgatgaaattgtggctgaaaaagaggctgaagttaaattgccagaggacagtagctgtacagaagatttaagttcatgcactagtgtgcctgagatgaatgaagacgggaacaggaaagaaagcaactgtgccaaagacctcagaagtcagccacctactagaataccaacactggttgacaaagagacaaacactgatgaagccgctaatgacaatatggcagttcgccccaaagagcgcagcagcctgagctctagacagcatccgtttgtgaggagcagtgtgatagtgcgctcacagaccttttctccaggagagcggaaccagtacatctgcaggttaaatcggagtgacagtgacagttcaaccctggctaaaaaatcactgtttgtgagaaactccaccgaacgccgcagtttgagggtcaaaaggacggtttgccagtcagtccttagaagaacaacacaggaatgcccagtgcggacatctctagacttagaactggaccttcaggcatctctgacccggcagagccgcctcaatgatgagctgcaggcgctgagggacttgcggcagaagctggaggaactgaaagctcagggagagactgaccttccaccaggcgtgctggaggatgagaggttccagaggcttctgaagcaagctgagaagcaggctgaacagtccaaagaagagcagaagcaaggtctgaatgcagagaagttgatgaggcaagtctccaaggacgtgtgtcggctccgggagcagagccagaaggtgcctcggcaggtgcagtccttcagggagaagattgcctacttcaccagagcaaagataagcatcccatccctgccagctgatgatgtgtgattacatgacttaagaaattattttttcatctgttcactttcttagggagggtaaaagactgaagatttgtgtttttgttttggtgtttggttttttttggtaacgtaactgtcaactcttgaagaacttttatttcacatcagattttcaacacattaatttgtaaagtaccttgagtgtaatttttatatgcttaaaaaagaaaaaatcatataagaaagatgggataacctggtacacaaatgttgcccagtatgtgcgcattgccagtggacttcattttgtaaaaatggaatagaggcagtaccccacatgtgtactgttgagccggctgttgagaaacaacttggttcagccggtggttttgcttctcctttgtgttcctgtgagtaggctgtgccgatggcagcagcgccacgtggtatctgtgcgctggcgaggagaggagcgctttccatttggaggcagtgtgagcacacgctggagtgcagcgttccaaagtccgcccgaaatggatgctgcgtccacggccatcacctgtgcgggaacacctggtttccttaagacaatttcctttttgtccttttatatttttctaaagaaaactaagatataaactaccaagtgctcttaagaataaaaataagaataagaatacaaaggagcactactcttggctacacgaaagatcttgggattcatgacactgagggcagggagaagaaagaacaccagccacgcagagatacaaataagctcatcaaatgagcagctggtttgtctcactcagcctgaatttgcattaagtgttcaaaagtgagtttctggcttgcactagtgttttgccctaaatctaaggatggtgcctagtggtggccctgtgttctgaggacagagagagctggaggggtggagggaaatgcatcggcactcatttggtgtaaccaagaagagggggaaagatgtcttgatagaatcaaagttgccaaaaacaaagaagagtttatcaagcagatttctaacatttagtagaaactacttcatagctctcatttttagggggttctatctataatttatggtaaatagttgggaggcaaagggaagaatgtgtgtggggggattattaatttgaagtataagctaaattgtttattaaaaagcctattttggatgaacaagtttagagagataaactgactaatgtgtcctccagtttagaatttcaccttacccgacccaggcacttcttaaaaacacagatcctcagtgcagctctgccagcatcaaggcttttaaaatatgtagtatttaggccatttaaaccatacttattactcaataacccaagaaacaattttgggttagccatctaatatagcaaataaaatagattttttaaagaaatccaaaattgtcttaaaggaatggaccccttgaagaaaaaaaaaaaaagttttgttcctcagttagaatgctcactagctcactagcaagaatttttattttcttgaaagcaattatatatattttggaaagttcatgttattggaattgaagttcaaattaagcaacttctgagcctagaactttaattactttttcctaaatgtcccaacacttacatacaaatttctttgaagacataactggacatggcagacactgctttgaacaaaaaccagcctagtgaattgactgagtacagtcctttaaggctgcccagttcattctattagatgactaaggaaaactagaaaaagaatacagttcacccttgtcaaggtcaaatgtgaaagacagaagtttatttaatgtagaggtaaatgaaggtgagctgttttcagcatcttagtttgaccatgaaaatgtctatagaattatgtgtagttgttccgtacgattttattttcttcatttatttatttacagtcttatttatgttctgtttaatatatagtttgattctggccattttaaatatttgacacagaagagactatattggaatatttacagctttataagtctttcatcagattagctgttgactttttgtaatacaaaaagtttcagacaagtattaaagaataaaatctgtctcaggctggtagttagcagttgtgaccaagatgcttttggttgttgtatttcacaaaatttcctcatttctaacatgagagatgaacttattttaatataatcctttttctacactttaaaagtcagcaatagtgttatgtatttataggcagcttttaataatcttgtcatatttgtactaacccaaatgattcacagtgacaaaacattttaataacttgatcacaaaaccatatggacaaatatgaattttaatattataaatactatttttaaaaggtagaatttattcgcacagggtaaaaagaatgtaatatttagttctcaagtttgaattatcagtatattattacaattttgtatatcagaatcttaagtgttacaggtacaaaaagaatattgctagccaaatgaacaaagtttagctaaatctctgtagcatgcaaatcaaataaattaaaattttttgctattgctttatctatattgtcttaaatatcaaaagctcaggactgaacttaatatttaatcaggttaaattctgaacatgtttctgttttaatttgtcttgtttgtaaacgtatgcaaatacatcacatagattaactggtttctgcactttccatgtgtttgtgggtggaaaaaaattcagtggttttttttaaaaaaaaaagcaaaaacaaagctacatattgcctaatactctatttcagtgtcgtttattgttcagtttatttccctgattggcacaaacacaagagtttccttgaaccatgtaccaagcaaatacaaaatatttcatgaagaaatccccaggctggcagtttgtgatgaatagttcttgttggaactatatgtattgctgataaaaaaggacgaagtattttcattgagcaaataaaatgaagggctccagaatatgtgctctgtggtcgctgcgcctgggctggcagtgtgctccacagagaggcagccgtcccaggaggttatctacccacacaccccagtcctgccctgccgtgccccccacaggctgctcagtgcctgggaagccagaaacgctgcccgtgaaatacagaacacaggatgcagaagcacgtttgtgtggcagagtctacttgaatcatccaaaacccaagatcgccctcctgcctctgacagtatagaaggcgtgactgaatgtggctgccttttgaaaaaggttccatagagacactgaggtctctgattcagaaggagatgatgtgtctacacctttcacctctgaagcttctaaagagctagtaattattttatataataagacgtcatgcattttaaataaatatgcaacaagacctcaggcttattatactaggttatcttaaacacctgaaataagtaaatgatttgccaaatgattccgctccatatgaataataccttcaaagatacatagagattaatgttttatttaccacttctgtgcaatcgctattttaaaattgagaaaactcatccacagtaatgggtgtcattactattcagtcttgattgattttggtctcagactagaagataaaaatggtttaccagtcttggaaagaaactatagtttaatagccacaggaaaagatgcattttcaaaaatcaaaagcacagtgagatgactagagcgggacatcctaccaaatccagtgttgagcaagcgtctcctgaacagcagacgcttgtcctttctggcttagtgtttcaggttggtgtttctcgtctccagttcttgatgatgatcttgtgtttgtgccactgcgtagtggcccgaagctaggggagcgtggctggagcaggctgcacagtggagcagacaccctcctagcagaagagaaagtccagcaaaccagcccagaaacagggcctccccaaactcccacctggggacaaagtctgggacgttctcatcccagaactcctgaaccgtcttgtgggcaacccaagagacgggaaccagggctgtgactcccgaggcccaggacagaattcctcccaggatcagcagtcgcctcttgagatctctctgactctctccaattctcaaacagtccaggccaaacccagagaccagcaggcccagaaatcccagcccatttgacagaaacattaagatcctggagaccctgagttcagcaggcaaagccaggaaggagtcaaagtccttgcattgcatccccacttcctcttggatgacacaggtttgccagagtcccatggtccagttttccatttcatttaagtccaggttgaggttcttccagtgtggcaggtagtttgtaagacaggataaaacccatcccagcaaagataatgaaactccagctagttgagctacagttctaaatactaaagccattataatgtcctgagagctttagccaaactaactcctgcccttcggttgctgtgaaaagaagtgtgacacttgtgttataacttatgaaactcagaaatatttcttcattgtgtatataggaggattcttgccagagttgctattgtttgattccatgttgaatgggtttcacaaaaggatagggaaataatgccgccaaccagtaatgccaaggtgtggccaagattgtgtttgtgtcctgtgggctggatttgacagaaagcagtttgtcactgaaatataattaagtgataatctcctttcattgtcaaggttaaaatggctttcatgttattcccaacctttctaacaaagaattaagtctaaatgcaaaatgtttaactgatggttttggttcaactcctcctgctttgtgtttcactaactgcacctgtcagattttcatctcttatagttctcacatttcaaatgtgcatgttatggtaatactgagtgttattttttaaaaataggtttaagaaaagtatttcttaaccaaataaatcaatcttatcagaaaaaaaaaaaaaaaa

SEQ ID NO: 63 - DNA, 2610 bp, Homo sapiens
caggggcggaggcggcggccagggaggaagcggaggaggcggaggcggccgcggcgttcgcccgcccgctcgctcgctcggtttccccgcccccgccgggcttaacgccgctgaaggtatccgggtgcgcgctgtcgcaacctgccctcatcctggcccgcgactgtaagaccggacccacatccagaccaatcttcctgtccgggctgctgcgacgcgggctccgcaggttgcaggcgggcggccggggcgcctgaaggttaccgagtgcatgagcgcctagcgcttcccgcgctgccccgcccgctggcccgccgacccgcccgccggctcgcccgccagcccctcggcgcccggcggcggcggcggcggtggcggcgacggtcgcaggaggtgccgtctgcctcccaggtgcgcgcttcgctcccggagccgcggaactcggcggccgccatggcgtccaacatggaccgggagatgatcctggcggattttcaggcatgtactggcattgaaaacattgacgaagctattacattgcttgaacaaaataattgggacttagtggcagctatcaatggtgtaataccacaggaaaatggcattctacaaagtgaatatggaggtgagaccataccaggacctgcatttaatccagcaagtcatccagcttcagctcctacttcctcttcttcttcagcgtttcgacctgtaatgccatccaggcagattgtagaaaggcaacctcggatgctggacttcagggttgaatacagagacagaaatgttgatgtggtacttgaagacacctgtactgttggagagattaaacagattctagaaaatgaacttcagatacctgtgtccaaaatgctgttaaaaggctggaagacgggagatgtggaagacagtacggtcctaaaatctctacacttgccaaaaaacaacagtctttatgtccttacaccagatttgccaccaccttcatcatctagtcatgctggtgccctgcaggagtcattaaatcaaaacttcatgctgatcatcacccaccgagaagtccagcgggagtacaacctgaacttctcaggaagcagtactattcaagaggtaaagagaaatgtgtatgaccttacaagtatccccgttcgccaccaattatgggagggctggccaacttctgctacagacgactcaatgtgtcttgctgaatcagggctctcttatccctgccatcgacttacagtgggaagaagatcttcacctgcacagacccgggaacagtcggaagaacaaatcaccgatgttcatatggttagtgatagcgatggagatgactttgaagatgctacagaatttggggtggatgatggagaagtatttggcatggcgtcatctgccttgagaaaatctccaatgatgccagaaaacgcagaaaatgaaggagatgccttattacaatttacagcagagttttcttcaagatatggtgattgccatcctgtattttttattggctcattagaagctgcttttcaagaggccttctatgtgaaagcccgagatagaaagcttcttgctatctacctccaccatgatgaaagtgtgttaaccaacgtgttctgctcacaaatgctttgtgctgaatccattgtttcttatctgagtcaaaattttataacctgggcttgggatctgacaaaggactccaacagagcaagatttctcactatgtgcaatagacactttggcagtgttgtggcacaaaccattcggactcaaaaaacggatcagtttccgcttttcctgattattatgggaaagcgatcatctaatgaagtgttgaatgtgatacaagggaacacaacagtagatgagttaatgatgagactcatggctgcaatggagatcttcacagcccaacaacaggaagatataaaggacgaggatgaacgtgaagccagagaaaatgtgaagagagagcaagatgaggcctatcgcctttcacttgaggctgacagagcaaagagggaagctcacgagagagagatggcagaacagtttcgtttggagcagattcgcaaagaacaagaagaggaacgtgaggccatccggctgtccttagagcaagccctgcctcctgagccaaaggaagaaaatgctgagcctgtgagcaaactgcggatccggacccccagtggcgagttcttggagcggcgtttcctggccagcaacaagctccagattgtctttgattttgtagcttccaaaggatttccatgggatgagtacaagttactgagcacctttcctaggagagacgtaactcaactggacccaaataaatcattattggaggtaaagttgttccctcaagaaacccttttccttgaagcaaaagagtaaacacggcccagcggtggaaccagccattccttgacaagccagcagcctgcgtcaggagaagggctcctcgccaacccacccacacgctcgtctcactcaattcaatgtcacacttctgcctcttgcaaaattgctggaaaaagtaataataaatatagctacttaagatttcccatcaaaaaaaaaaaaaaaaaaaaaaaaaaa

SEQ ID NO: 64 - DNA, 4565 bp, Homo sapiens
ctccagtctgtctgtgctctcaaaaactttagtcgttataacaactgtgactgttgagaaatttcactgttttcctgcattcctggcgcgggactctagccagaggctccgaggactttgtagcgactgtcccaagcgtccagttcgatgcttctcagggcggcttgctttaagggcccacccctaaatttgggttgtaaaaatttttgaggcagaagctgaggaagattgtcattctgatactgtcagagcagatgatgatgaagaaaatgaaagtcctgctgaaacagatctgcaggcacaactccagatgttccgagctcagtggatgtttgaacttgctccaggtgtaagctctagcaatttagaaaatcgaccttgcagagcagcaagaggctctctccagaaaacatcggcagataccaaaggaaaacaagaacaggcaaaagaagaaaaggctcgagaactcttcctaaaagcagtagaagaagaacaaaatggagctctctatgaagccatcaagttttatcgtagggctatgcaacttgtacctgatatagagttcaagattacttatacccggtctccagatggtgatggcgttggaaacagctacattgaagataatgatgatgacagcaaaatggcagatctcttgtcctacttccagcagcaactcacatttcaggagtctgtgcttaaactgtgtcagcctgagcttgagagcagtcagattcacatatcagtgctgccaatggaggtcctgatgtacatcttccgatgggtggtgtctagtgacttggacctcagatcattggagcagttgtcgctggtgtgcagaggattctacatctgtgccagagaccctgaaatatggcgtctggcctgcttgaaagtttggggcagaagctgtattaaacttgttccgtacacgtcctggagagagatgtttttagaacggcctcgtgttcggtttgatggcgtgtatatcagtaaaaccacatatattcgtcaaggggaacagtctcttgatggtttctatagagcctggcaccaagtggaatattacaggtacataagattctttcctgatggccatgtgatgatgttgacaacccctgaagagcctcagtccattgttccacgtttaagaactaggaataccaggactgatgcaattctactgggtcactatcgcttgtcacaagacacagacaatcagaccaaagtatttgctgtaataactaagaaaaaagaagaaaaaccacttgactataaatacagatattttcgtcgtgtccctgtacaagaagcagatcagagttttcatgtggggctacagctatgttccagtggtcaccagaggttcaacaaactcatctggatacatcattcttgtcacattacttacaaatcaactggtgagactgcagtcagtgcttttgagattgacaagatgtacacccccttgttcttcgccagagtaaggagctacacagctttctcagaaaggcctctgtagagcctcaagtccagtcctctatcacttttgcatgaattaaagtatatagcgcaaaagagcacctaagttataaatgtgtgtgtgtgcgtgtgtgtgtatatatatatatatatatatatatatatatatatatatatatatatatggaattggaacttattttaaattgttggagttcttttaagaagaatataaattgattattttttttatttaaagggatagttgattcctggggtgttttgaaattaagttggaattaagttgcttaagcatatttatgttgtgagaaaccttaatatgaggtttatcatgccctttttcaagcagatttatgagcagatttctgtcacataagtcgtcttctgcttgagtatcctaatatttcaatgcatcaggggagcgctccactggataagcattttatttcccgcatggcataatgtttttgcactaaaggctcaaagtgtgagaacctgttctggatttgtttgaaattatttcaccaataaagatcataaataaatgtttctttcaagaaaatatatttggatggcctttttaaagtaacaggatatttaataagagtcctagatagccagcggagactttaagaatcattgcctctagctgggtgtggtggcatgcacctgtagtcccagctatttgggaggctgatgcaggagaatagcttaagcccaggaatttgagtctgggagtttgagtccagcatgggcaacataacaagaccccatcccttattaaaagaaaaaaaaataattcctcatttcatcattggtctttatatgtagccacaaacactgacctcatgtaggcaccttaccaatatatgacattaagtgagagtgaatcccttaggactggaacacttcaagctcaaccaactgactcagttgtcattcttcacaaaagaatagtagaggatcatgtaaacctgagcctaactcttgttccagtatgaaagttgggggagagcaccagccacctaggaaaactgtatgttacctttttactcaaaggagtcccccctgcccagtaacagtcctattagtgtttaatttcagagtttgtgtctggtagacctctacctgattcagatttggttttgttgtttcaaccatagttagagacaaattctcatgtactttcagaaatcaatatctgcagccactgttacttttaattgacattaagagacacttcataggttcccacaattcagtatgggataggctttttaaaaagcacatacagaccaggcgtggtggctcatgcctataatcccagcactttgggaggctaagacaggcagatcacctgagctcaggagtccaagaccagcctgggcaacatggcaaaacaccgtctctacaaaaaaaaaaaaaaaaaaaattagccaagtacagtggggcacacctatagtcgcagctacttgggaggctggggcaggagaattgcctgagcctgggaagtggaagttgcagtgagccaagatcgtgccattccactccagcctgagcaacacagtgagaccctatctcaaaaaaataatgatgatagtacacgttatgttaaaggtgaaatgtgcatacagaaggaagagagttggccaggtgtggtgactcacacctataatcccaatactttgggaggccaaggcaggaggattgcttgaggtcaggagttttagaccagcctggacaacatagcaagacctcatctcttctaaaaattaaaaaaaaaaaaaataggcatggtggtacacacctgtggtcccagctagttgggaggctaaggcaggaggatcacttagccaggaggctgaggctacagtgagccaagattgcaccactgtgctccagcctgggtgagaaagcgagaccctgtctcaaaaaagaaaaaaaagagaggttggccttttgtagcaatctgagaagtgtgtttttcaagttggaaaggaaggagaaaagcaacttgcctaagataaggtagctcttcatgatatgactgttatttctgatatacaaataaatagaacatgattaggacatagtcaaatatagctagaaaaatatattcctaaggaaagtgagatttgaggagtccctgttgttctgcaacatccctagattgaatgatctgttgcagatggtggataccaagttcaaatttaaagatttctttgtaagcagtaaagtgactttcacttatttaacttagaactggaaaaagtaacttttttccagattacattttctgtatatttgtaaaatgcaaaagcaatatatatttgttgtgagaaaattagaatatacagataaaataaaatttaaaaaaacacccaaagataaccagaagaaaatttttgctatgtaacctttttcttctggtctttgcaaatcctgccgtagaaactttttaacttcaggagtgtccttcctttgctctattaggacattacagaaaccaatactatgaaaagctgacagcagtatctggattaactttttaaaaacaatgaaagcattttacagaaattacatttcagatcgtgctggaactgtgttcagaagatatcctcagagggaatctggcctgagcaccatcatgtttaattgcctcctcctgtcttgcattttcctcccagcccccttcctaccccttagcagagggccaggtgagggtgcttggggcccatgggggctgggagtgtagacttcagttacacccccagcccccaggggaaagcattagccttgaatcctcaatcccaggccctctactaaccactctcaacctatggtatttatcttttgattattctgtgcatctataaaaatgggattatattgtacagaatgctttgtaagctttctctccccacataagaatgccctgtaagcattttgttaaatatttttaatgactttagagtccaactttatactcctctttacgcattttggttttctaatttaatggtagtgtaaacgtttttggaataaacattcctgtggctaaa

SEQ ID NO: 65 - DNA, 4688 bp, Homo sapiens
gtccggggtctccagtagggctgacgctccggtgctcgcacaatcccccgcctcggctggcaacgggcgtccctccactccccgagtccccggcagccgccgccaccccagcgcgccccgatctggccccctgccccgcgaagatggctgccgtacgccgggcccgcagttattgccgctgcctggtgcgcttctccgaccgagaactctgctaagctccgctgcagagacaggcaggagtagacacccggacacccagcacccctcctccggggggcggtgcagagggggcacggagagcccctcgagcgcagcaggccgccccgccagcatggcagaagctgaggaagattgtcattctgatactgtcagagcagatgatgatgaagaaaatgaaagtcctgctgaaacagatctgcaggcacaactccagatgttccgagctcagtggatgtttgaacttgctccaggtgtaagctctagcaatttagaaaatcgaccttgcagagcagcaagaggctctctccagaaaacatcggcagataccaaaggaaaacaagaacaggcaaaagaagaaaaggctcgagaactcttcctaaaagcagtagaagaagaacaaaatggagctctctatgaagccatcaagttttatcgtagggctatgcaacttgtacctgatatagagttcaagattacttatacccggtctccagatggtgatggcgttggaaacagctacattgaagataatgatgatgacagcaaaatggcagatctcttgtcctacttccagcagcaactcacatttcaggagtctgtgcttaaactgtgtcagcctgagcttgagagcagtcagattcacatatcagtgctgccaatggaggtcctgatgtacatcttccgatgggtggtgtctagtgacttggacctcagatcattggagcagttgtcgctggtgtgcagaggattctacatctgtgccagagaccctgaaatatggcgtctggcctgcttgaaagtttggggcagaagctgtattaaacttgttccgtacacgtcctggagagagatgtttttagaacggcctcgtgttcggtttgatggcgtgtatatcagtaaaaccacatatattcgtcaaggggaacagtctcttgatggtttctatagagcctggcaccaagtggaatattacaggtacataagattctttcctgatggccatgtgatgatgttgacaacccctgaagagcctcagtccattgttccacgtttaagaactaggaataccaggactgatgcaattctactgggtcactatcgcttgtcacaagacacagacaatcagaccaaagtatttgctgtaataactaagaaaaaagaagaaaaaccacttgactataaatacagatattttcgtcgtgtccctgtacaagaagcagatcagagttttcatgtggggctacagctatgttccagtggtcaccagaggttcaacaaactcatctggatacatcattcttgtcacattacttacaaatcaactggtgagactgcagtcagtgcttttgagattgacaagatgtacacccccttgttcttcgccagagtaaggagctacacagctttctcagaaaggcctctgtagagcctcaagtccagtcctctatcacttttgcatgaattaaagtatatagcgcaaaagagcacctaagttataaatgtgtgtgtgtgcgtgtgtgtgtatatatatatatatatatatatatatatatatatatatatatatatatggaattggaacttattttaaattgttggagttcttttaagaagaatataaattgattattttttttatttaaagggatagttgattcctggggtgttttgaaattaagttggaattaagttgcttaagcatatttatgttgtgagaaaccttaatatgaggtttatcatgccctttttcaagcagatttatgagcagatttctgtcacataagtcgtcttctgcttgagtatcctaatatttcaatgcatcaggggagcgctccactggataagcattttatttcccgcatggcataatgtttttgcactaaaggctcaaagtgtgagaacctgttctggatttgtttgaaattatttcaccaataaagatcataaataaatgtttctttcaagaaaatatatttggatggcctttttaaagtaacaggatatttaataagagtcctagatagccagcggagactttaagaatcattgcctctagctgggtgtggtggcatgcacctgtagtcccagctatttgggaggctgatgcaggagaatagcttaagcccaggaatttgagtctgggagtttgagtccagcatgggcaacataacaagaccccatcccttattaaaagaaaaaaaaataattcctcatttcatcattggtctttatatgtagccacaaacactgacctcatgtaggcaccttaccaatatatgacattaagtgagagtgaatcccttaggactggaacacttcaagctcaaccaactgactcagttgtcattcttcacaaaagaatagtagaggatcatgtaaacctgagcctaactcttgttccagtatgaaagttgggggagagcaccagccacctaggaaaactgtatgttacctttttactcaaaggagtcccccctgcccagtaacagtcctattagtgtttaatttcagagtttgtgtctggtagacctctacctgattcagatttggttttgttgtttcaaccatagttagagacaaattctcatgtactttcagaaatcaatatctgcagccactgttacttttaattgacattaagagacacttcataggttcccacaattcagtatgggataggctttttaaaaagcacatacagaccaggcgtggtggctcatgcctataatcccagcactttgggaggctaagacaggcagatcacctgagctcaggagtccaagaccagcctgggcaacatggcaaaacaccgtctctacaaaaaaaaaaaaaaaaaaaattagccaagtacagtggggcacacctatagtcgcagctacttgggaggctggggcaggagaattgcctgagcctgggaagtggaagttgcagtgagccaagatcgtgccattccactccagcctgagcaacacagtgagaccctatctcaaaaaaataatgatgatagtacacgttatgttaaaggtgaaatgtgcatacagaaggaagagagttggccaggtgtggtgactcacacctataatcccaatactttgggaggccaaggcaggaggattgcttgaggtcaggagttttagaccagcctggacaacatagcaagacctcatctcttctaaaaattaaaaaaaaaaaaaataggcatggtggtacacacctgtggtcccagctagttgggaggctaaggcaggaggatcacttagccaggaggctgaggctacagtgagccaagattgcaccactgtgctccagcctgggtgagaaagcgagaccctgtctcaaaaaagaaaaaaaagagaggttggccttttgtagcaatctgagaagtgtgtttttcaagttggaaaggaaggagaaaagcaacttgcctaagataaggtagctcttcatgatatgactgttatttctgatatacaaataaatagaacatgattaggacatagtcaaatatagctagaaaaatatattcctaaggaaagtgagatttgaggagtccctgttgttctgcaacatccctagattgaatgatctgttgcagatggtggataccaagttcaaatttaaagatttctttgtaagcagtaaagtgactttcacttatttaacttagaactggaaaaagtaacttttttccagattacattttctgtatatttgtaaaatgcaaaagcaatatatatttgttgtgagaaaattagaatatacagataaaataaaatttaaaaaaacacccaaagataaccagaagaaaatttttgctatgtaacctttttcttctggtctttgcaaatcctgccgtagaaactttttaacttcaggagtgtccttcctttgctctattaggacattacagaaaccaatactatgaaaagctgacagcagtatctggattaactttttaaaaacaatgaaagcattttacagaaattacatttcagatcgtgctggaactgtgttcagaagatatcctcagagggaatctggcctgagcaccatcatgtttaattgcctcctcctgtcttgcattttcctcccagcccccttcctaccccttagcagagggccaggtgagggtgcttggggcccatgggggctgggagtgtagacttcagttacacccccagcccccaggggaaagcattagccttgaatcctcaatcccaggccctctactaaccactctcaacctatggtatttatcttttgattattctgtgcatctataaaaatgggattatattgtacagaatgctttgtaagctttctctccccacataagaatgccctgtaagcattttgttaaatatttttaatgactttagagtccaactttatactcctctttacgcattttggttttctaatttaatggtagtgtaaacgtttttggaataaacattcctgtggctaaa

SEQ ID NO: 66 - DNA, 4438 bp, Homo sapiens
aaagtggctgaatgagaaatgtagattgcagagggcaactggtgtgtttatatgcctgacattatttgggttttcccccctcaggcagaagctgaggaagattgtcattctgatactgtcagagcagatgatgatgaagaaaatgaaagtcctgctgaaacagatctgcaggcacaactccagatgttccgagctcagtggatgtttgaacttgctccaggtgtaagctctagcaatttagaaaatcgaccttgcagagcagcaagaggctctctccagaaaacatcggcagataccaaaggaaaacaagaacaggcaaaagaagaaaaggctcgagaactcttcctaaaagcagtagaagaagaacaaaatggagctctctatgaagccatcaagttttatcgtagggctatgcaacttgtacctgatatagagttcaagattacttatacccggtctccagatggtgatggcgttggaaacagctacattgaagataatgatgatgacagcaaaatggcagatctcttgtcctacttccagcagcaactcacatttcaggagtctgtgcttaaactgtgtcagcctgagcttgagagcagtcagattcacatatcagtgctgccaatggaggtcctgatgtacatcttccgatgggtggtgtctagtgacttggacctcagatcattggagcagttgtcgctggtgtgcagaggattctacatctgtgccagagaccctgaaatatggcgtctggcctgcttgaaagtttggggcagaagctgtattaaacttgttccgtacacgtcctggagagagatgtttttagaacggcctcgtgttcggtttgatggcgtgtatatcagtaaaaccacatatattcgtcaaggggaacagtctcttgatggtttctatagagcctggcaccaagtggaatattacaggtacataagattctttcctgatggccatgtgatgatgttgacaacccctgaagagcctcagtccattgttccacgtttaagaactaggaataccaggactgatgcaattctactgggtcactatcgcttgtcacaagacacagacaatcagaccaaagtatttgctgtaataactaagaaaaaagaagaaaaaccacttgactataaatacagatattttcgtcgtgtccctgtacaagaagcagatcagagttttcatgtggggctacagctatgttccagtggtcaccagaggttcaacaaactcatctggatacatcattcttgtcacattacttacaaatcaactggtgagactgcagtcagtgcttttgagattgacaagatgtacacccccttgttcttcgccagagtaaggagctacacagctttctcagaaaggcctctgtagagcctcaagtccagtcctctatcacttttgcatgaattaaagtatatagcgcaaaagagcacctaagttataaatgtgtgtgtgtgcgtgtgtgtgtatatatatatatatatatatatatatatatatatatatatatatatatggaattggaacttattttaaattgttggagttcttttaagaagaatataaattgattattttttttatttaaagggatagttgattcctggggtgttttgaaattaagttggaattaagttgcttaagcatatttatgttgtgagaaaccttaatatgaggtttatcatgccctttttcaagcagatttatgagcagatttctgtcacataagtcgtcttctgcttgagtatcctaatatttcaatgcatcaggggagcgctccactggataagcattttatttcccgcatggcataatgtttttgcactaaaggctcaaagtgtgagaacctgttctggatttgtttgaaattatttcaccaataaagatcataaataaatgtttctttcaagaaaatatatttggatggcctttttaaagtaacaggatatttaataagagtcctagatagccagcggagactttaagaatcattgcctctagctgggtgtggtggcatgcacctgtagtcccagctatttgggaggctgatgcaggagaatagcttaagcccaggaatttgagtctgggagtttgagtccagcatgggcaacataacaagaccccatcccttattaaaagaaaaaaaaataattcctcatttcatcattggtctttatatgtagccacaaacactgacctcatgtaggcaccttaccaatatatgacattaagtgagagtgaatcccttaggactggaacacttcaagctcaaccaactgactcagttgtcattcttcacaaaagaatagtagaggatcatgtaaacctgagcctaactcttgttccagtatgaaagttgggggagagcaccagccacctaggaaaactgtatgttacctttttactcaaaggagtcccccctgcccagtaacagtcctattagtgtttaatttcagagtttgtgtctggtagacctctacctgattcagatttggttttgttgtttcaaccatagttagagacaaattctcatgtactttcagaaatcaatatctgcagccactgttacttttaattgacattaagagacacttcataggttcccacaattcagtatgggataggctttttaaaaagcacatacagaccaggcgtggtggctcatgcctataatcccagcactttgggaggctaagacaggcagatcacctgagctcaggagtccaagaccagcctgggcaacatggcaaaacaccgtctctacaaaaaaaaaaaaaaaaaaaattagccaagtacagtggggcacacctatagtcgcagctacttgggaggctggggcaggagaattgcctgagcctgggaagtggaagttgcagtgagccaagatcgtgccattccactccagcctgagcaacacagtgagaccctatctcaaaaaaataatgatgatagtacacgttatgttaaaggtgaaatgtgcatacagaaggaagagagttggccaggtgtggtgactcacacctataatcccaatactttgggaggccaaggcaggaggattgcttgaggtcaggagttttagaccagcctggacaacatagcaagacctcatctcttctaaaaattaaaaaaaaaaaaaataggcatggtggtacacacctgtggtcccagctagttgggaggctaaggcaggaggatcacttagccaggaggctgaggctacagtgagccaagattgcaccactgtgctccagcctgggtgagaaagcgagaccctgtctcaaaaaagaaaaaaaagagaggttggccttttgtagcaatctgagaagtgtgtttttcaagttggaaaggaaggagaaaagcaacttgcctaagataaggtagctcttcatgatatgactgttatttctgatatacaaataaatagaacatgattaggacatagtcaaatatagctagaaaaatatattcctaaggaaagtgagatttgaggagtccctgttgttctgcaacatccctagattgaatgatctgttgcagatggtggataccaagttcaaatttaaagatttctttgtaagcagtaaagtgactttcacttatttaacttagaactggaaaaagtaacttttttccagattacattttctgtatatttgtaaaatgcaaaagcaatatatatttgttgtgagaaaattagaatatacagataaaataaaatttaaaaaaacacccaaagataaccagaagaaaatttttgctatgtaacctttttcttctggtctttgcaaatcctgccgtagaaactttttaacttcaggagtgtccttcctttgctctattaggacattacagaaaccaatactatgaaaagctgacagcagtatctggattaactttttaaaaacaatgaaagcattttacagaaattacatttcagatcgtgctggaactgtgttcagaagatatcctcagagggaatctggcctgagcaccatcatgtttaattgcctcctcctgtcttgcattttcctcccagcccccttcctaccccttagcagagggccaggtgagggtgcttggggcccatgggggctgggagtgtagacttcagttacacccccagcccccaggggaaagcattagccttgaatcctcaatcccaggccctctactaaccactctcaacctatggtatttatcttttgattattctgtgcatctataaaaatgggattatattgtacagaatgctttgtaagctttctctccccacataagaatgccctgtaagcattttgttaaatatttttaatgactttagagtccaactttatactcctctttacgcattttggttttctaatttaatggtagtgtaaacgtttttggaataaacattcctgtggctaaa

SEQ ID NO: 67 - DNA, 5823 bp, Homo sapiens
aagtcacgtgctgtgacagtagctggggtgaggccgtcgtcgccgcacgggctggttggggctgtgtctgtgggaggcgccggggtgatggcggtggagactctgtccccggactgggagtttgaccgcgttgacgacggctcgcagaaaattcatgccgaagtccaacttaagaattatgggaaatttcttgaggagtatacctctcaactgagaagaattgaggacgctctggatgactcaattggagatgtttgggatttcaatcttgatcctatagcattaaagcttttgccttatgaacagtcctctcttttggaactcataaagactgaaaacaaggtcttaaacaaagtcatcactgtttatgctgcactttgttgtgaaatcaagaaattaaaatatgaggctgaaactaaattttacaatggtctcttgttttatggagaaggagctacagatgccagcatggtggaaggtgattgccaaattcaaatggggagatttatttcattcttacaggaactgtcttgctttgttacgaggtgctatgaagtggtgatgaacgtagtccaccagttggctgccctctatatcagtaacaagattgcacccaaaattatagagacaactggagttcattttcagactatgtatgagcacttgggagaactgctaacagttttgctcaccctggatgaaattattgataatcatatcacactgaaagaccactggactatgtacaaaaggttactgaaatctgtccatcacaatccttcaaaatttggaattcaggaagaaaaattaaagccatttgaaaagttcttgctgaagctagaagggcaattactggatggaatgatattccaggcctgtatagaacaacaatttgattctctcaatggaggagtatctgtgtcaaaaaatagtacttttgctgaggaatttgcacatagtattcggtcaatttttgcaaatgtagaagccaaacttggagaaccttctgaaattgaccagagagacaagtatgttggaatttgtggactctttgtattgcactttcagatttttcgaactattgataaaaagttttataagtctttattggacatttgtaagaaggtaccagccatcactctaactgctaatattatttggtttcctgataattttctgatccagaaaataccagcagctgccaaactgctagacagaaaaagtcttcaagccattaaaatacacagggatacttttctacaacagaaagctcaatcacttaccaaagatgtacagtcttactacgtctttgtgagctcatggatgatgaaaatggaatctattttgtctaaagagcagagaatggataaatttgctgaagatctcaccaatagatgtaatgtttttatacagggcttcttgtatgcatatagtattagtaccattattaaaaccacaatgaatctctacatgtccatgcaaaagccaatgaccaaaacctcagttaaggcattgtgcaggcttgttgaacttctcaaggcaatagagcatatgttctacaggagaagcatggttgtggctgattcagtttcacatataacacagcaccttcaacatcaggctcttcattctatttctgtggccaagaaaagagtgatttctgacaaaaaatacagcgaacagcgtcttgatgtgctctctgctctagttttggctgaaaacactctaaatggaccaagcacaaagcaacggcgacttattgtttctttggcactaagtgttggcacacaaatgaaaacatttaaagatgaagaactctttccacttcaagtagtcatgaaaaaactggatcttattagtgaacttagagaacgagtccaaacacaatgtgactgttgttttttatactggcatcgagctgtcttcccaatttatttagatgatgtatatgaaaatgctgttgatgcagccagattacattacatgttcagtgctttgcgcgactgtgtacctgctatgatgcatgcaaggcatttagagtcctatgagatacttctggattgctatgacaaggaaattatggaaattttaaatgagcatttgctggacaaattatgcaaagaaatagagaaagatctgcgactttctgtgcatactcatttaaagctggatgaccgaaaccctttcaaagttggcatgaaagacctggctctttttttctctctgaatccaattcggtttttcaatcgtttcattgacattcgggcttacgtaactcactacctagacaagactttctacaatctaacaactgtagcccttcatgactgggccacttatagtgagatgagaaacttagctactcagcgttatggactggttatgacagaggcacatcttcccagtcagactttggaacagggccttgatgttttagaaattatgagaaacattcatatatttgtgtcccgatacctctataatctcaacaatcagatttttattgaacgaacaagcaataacaagcatttgaatactattaatattcggcatattgctaattcaattcgaacacatggcacgggaattatgaatacaactgttaatttcacctaccagtttttgaaaaagaagttctatatatttagccaatttatgtatgatgaacacatcaaatccagattgattaaagatattcgatttttcagggaaattaaggaccaaaatgatcataagtatccttttgatagagcagaaaaattcaatcgaggcatcagaaaacttggagtaacacctgagggacagagctaccttgatcaattcaggcaactcatcagccagattggtaatgctatgggctatgtacgaatgataagatctggtggtcttcattgtagcagcaatgccattagatttgttcctgatcttgaagatattgtaaattttgaagaactagtaaaagaagaaggtcttgcagaagaaacattaaaagcagcaaggcatttggattcagtcctcagtgatcacacacgaaattctgccgaaggcacagaatatttcaaaatgcttgtagacgtttttgctccagaatttcgaaggccaaagaatatacatctccgaaatttctatataattgttccccctctgaccctcaactttgtagagcattccattagttgcaaggaaaaattaaataaaaaaaataaaattggagctgcctttactgatgatggctttgccatgggtgtggcttacattctaaagcttttggatcagtatcgggagtttgattcacttcactggttccagtctgttagagagaaatacctgaaggagataagagcagttgctaagcaacagaatgtacagtcagccagtcaagatgaaaaactcttacaaaccatgaatctcactcagaagcgactggatgtctatctacaggaatttgaattgctgtatttctcactgagcagtgcaagaattttcttcagagcagacaagactgcggctgaagaaaaccaagaaaagaaagagaaggaagaagaaactaaaacaagcaatggagacctgtctgacagcactgtgtctgctgatcctgttgtgaaatgatacggatggtattcactgcacatatgatgaaatcatcagaattgttaaaacttttgccagtggaatggataaactattgatgaattgtttcctgggtcacatctctggaaaatagatgttacagttcttaaaggcagtgctttaaagtgaagttcattctgtttccaaaggctctactttcaaaggttaagaatgagattttaaaattggatttttgcctggacttgagggtacaagatgtttctatttgaagtgaagttataaaagggcaaatccagattcataaactatcacctcggatttcttgtaatctacatgtttgtaatttgtatttgcatagatctttgatctatagttatttcaagtcatgggaaattcaatgcatatactatatacagccagtaaatacatgcttaacaaaaggaatgagcctgaagttcataaagaatacatatcaatattcttataaaaggaatatatgaagatggctttgatactagaggtgaggcacaagtgttttatgtactctcagtgtacagtataactgatgatccttctttcattgttaatttcatgtgactcacaagagctgctgatgtctttgatgagacattttataactagtttacattgctttgagaacatttaacctccaacagctgctttaaatttaagatttacttaatactcagaaaattcagataaagccatagagtcctgtttgaagcttcacttctattttggttgaaggcatgatgtatgatgtcagaaaaaaaattgaatgaattatttctacatccaaactcaggtttcttctacattagattgaattgaaattttggtgatggtttgggtagactttttttttatatcaagtataatttaaaacatcagattaaataattacactgttcaggcttttaaaaaaataccactgtgagaataaagcgctagcaagatacatcacttactgattttaaaaatacagaaagattttgagtaaattttgtgcccagcaagctgttagttttatttttgtaaaggtatgtaagttattaaatggttaatcatggccttttaaaaataaaataaagtgatacctttacaatgaagacaaaagtttaaaactttctaatacaaacaccattttgggaaatgcttgatttttttctattgcatttgtctgctaaacatttctttggataaatcctgcaaatacttctaacattattctttgattccagcttttagaatgggtgtacaatgccctgtttgtacttactggttagggtcagggtaacttgccagcccaagataaatactttaattgttaaaagtcagaagagacagaatatgtaggaaatgttttttgtttattatgtaaacatggcttacagaattatgaacagtggatagattaaaggcatttaatatttgtaattcataataactgtagaaatggccctaaagcatgctgcataattaataatttatattttcattattataagtgtttatattaatgatcttgcatttgattatatcaaattcgtcatttcatagcaacagtattgttttctctgtttttcttctctaacttctctgaaatcatctcctattaagggatagaaattgttactagaagagaatcacatgttctgtgttcattatccctacacatgtaaattaattattttatcaatactagatagagttcacatgctgactccctggatacctacagttgagaagaaaatgacagacaattatttttcctttaggtcaaaataatgtcactgctatctggataaattataagttcatatatttgaaataagatcctggaaacgaatttaaatggtgtcaaactgcagagcaacagggcttcagtatattcacatctaataggttaatatgtacatttggatgatgatttttcttgataacattaacattaattttattttttcagacatactgtaatttaaaaattaatgtgagcgtttgttttaagttcacagaaaacttaataattcaaattctcaggaattaaggactcaccataacattgtcagttctaatgaaattttgtaaaagatggcaagtttgttacctcacttgagtggggttttccttttcccccaattctaagagaatataatgtgtatactaaaacattaataaacataattttgaaaaaaaaaaaaaaaaaaa

SEQ ID NO: 68 - DNA, 3043 bp, Homo sapiens
atcacatggccggagagtcacaaaaacaacagctttggccaagaccgtgacttcagtaaagggaacccggggctctcgcagccagccctcctgcccatggaggacagtttccttcaatcttttgggaggctgagcctccagccccagcagcagcagcagcggcagcggccgccccggccgcccccgcgggggacacctcctcgccgccacagctttaggaaacacctctacctcctgcgaggcctcccgggctccgggaaaactacactggccagacaattgcagcatgactttcccagggccctgattttcagcacggatgattttttcttcagggaagatggtgcctatgagttcaatcctgacttcctggaggaagctcatgaatggaaccaaaaaagagcaagaaaagcaatgaggaatggcatatcccccattattattgataataccaacctccacgcctgggaaatgaagccctatgcagtcatggtatttcagaccgaacaaaagaatcttttcaggctggaaatggacatggtagttttcaggccagaaatgaagaaacattcatggtgtctcaagagaaaaaatccaccgaatgaaagaacggtatgaacacgatgttacttttcacagtgtgcttcatgcagaaaagccaagcagaatgaacagaaaccaggacaggaataatgcattgccttccaacaatgccagatactggaattcctacacagagtttccaaaccggagggcccacggtggatttacaaatgagagctcctatcacagaaggggcggttgtcaccatggatattagaggcctatcttacagccaggcagaattttcctaagtcagtttctacttcagtttttgttattttttgttgcattttagtcagagctccaattccagtgtaaatagctgaactcaaaagtttctgagcaaagtcattatattcactttcttcaccaaaatttgttaaagtgcttctatatgcatggtctgatgctgggaattctgcagatttgagtaaacagtctctttctctagggtaagaatttgaaaccaaaacttgagaacacacccaagaatatatttacataggttcatagatgaaataaagtgtttatattatatataagcttcagtaccatttgctctgaagtgatctatttattttttcaggaaattcatctccatcggtaaagttgggaaggtggagagaagtggtgggggggcattgctacttatcaaagtgccattgctactttgataatctatgtatctaaaaatgtgagatgtgcgactcttatgatactgattttcctttaatgttaatatgccagaaagcatacatctaagggaacattgtccttcaaagtagacactttgggaagttatttctttattttaatgatgtatcattgttaaaaatgctgtcaaatccttaatagctacaggagctactgagggaaatcagtgtcattatttaaagtcacgccttgtgtttttactactttattcagcaggattaaacctgaataacttttggctgttgtgctaatagtgtaaataaaataagcctgccttcataaaacactaacttttaaaaggaataaacgacttctaaaattatgcctattaacatgtgtaattagtcggcagctcaaatgtttgggagtgcaagaaattaggcaccccaggatataggtcatacagggatatataaaagccatgctcattacaaaatgagcagttgatgttttatgtggcattaagacaatcaagtcctcacaactctggaatgtcttcttatactgatgctgaatttatgaatccaaattaatttccaacaggttggaatcagatttaatgtgagatcatgatagacaagaccacagaggacgtatgctctatttcttgttggccaacagcttctttctaatgttctgtgaaaaattattttaagtgtcttatataatggtgcttttatggttattaaaaattgtaaatggtatcacatttatatggatttgtcattggatctttttttggttcaacaataaaaaaatttaattacctaaatgccaagaaactcaacaatataccagtttttctgtatcacaggcttatttaccagtcttttttttaataaataggaatcgtaaaggtaatgacaaaagcagccttataatttagttgcttatatatttgatctgtgtacatgagactgttttaacgttatctgacactactgaaacctgctcgacatctccatgactaccaacaccatgtgtaatgttttcttcactaacattttaaaaactggtatctcctttgagtaagtttggctgacaatagtaaatcccaatgaatctaaggtgttatcagctttgctaacttctgtatctccaagcacaacataaaataatctcctaatgatctacttaataatgctcccattttccaggcccaggtagtcctgggtatcttggttgatagggtggtggcataaccagctcaatatggatggcttgactcgtctgggctggtagaggggagaaatgtcagagagctcaaagtggaaattaccatcctttgatttcacatgagcggttcaaaggaccagattcaagccctcctgacttggctggctccctgctttagggtttttggctcacttgggttaagtgagtgaccactatggagaagtggctctgggttacataacttttctagagctctaaagaatagtttcctggcctatttaatgtctcttctttccctagctgacccctgaaatatttggtttgtaaaccataaaaattgattaaatgccatcaactttatcccctgtagaagtgatctgtttttcaactcccatggcttctgatttgtgtaactctttgaacacccaatattgacttgtattgtgttcgctgtttgcatcattcatagaactggcaaatgctctttatgggcaatagggtctcattaaatgattgctgaataaataacacaaatttttaccattaaaaa

SEQ ID NO: 69 - DNA, 3051 bp, Homo sapiens
atcacatggccggagagtcacaaaaacaacagctttggccaagaccgtgacttcagtaaagggaacccggggctctcgcagccagccctcctgcccatggaggacagtttccttcaatcttttgggaggctgagcctccagccccagcagcagcagcagcggcagcggccgccccggccgcccccgcgggggacacctcctcgccgccacagctttaggaaacacctctacctcctgcgaggcctcccgggctccgggaaaactacactggccagacaattgcagcatgactttcccagggccctgattttcagcacggatgattttttcttcagggaagatggtgcctatgagttcaatcctgacttcctggaggaagctcatgaatggaaccaaaaaagagcaagaaaagcaatgaggaatggcatatcccccattattattgataataccaacctccacgcctgggaaatgaagccctatgcagtcatggcacttgaaaataactatgaagttatattccgagaacctgacactcgctggaaattcaacgttcaagagttagcaagaagaaacattcatggtgtctcaagagaaaaaatccaccgaatgaaagaacggtatgaacacgatgttacttttcacagtgtgcttcatgcagaaaagccaagcagaatgaacagaaaccaggacaggaataatgcattgccttccaacaatgccagatactggaattcctacacagagtttccaaaccggagggcccacggtggatttacaaatgagagctcctatcacagaaggggcggttgtcaccatggatattagaggcctatcttacagccaggcagaattttcctaagtcagtttctacttcagtttttgttattttttgttgcattttagtcagagctccaattccagtgtaaatagctgaactcaaaagtttctgagcaaagtcattatattcactttcttcaccaaaatttgttaaagtgcttctatatgcatggtctgatgctgggaattctgcagatttgagtaaacagtctctttctctagggtaagaatttgaaaccaaaacttgagaacacacccaagaatatatttacataggttcatagatgaaataaagtgtttatattatatataagcttcagtaccatttgctctgaagtgatctatttattttttcaggaaattcatctccatcggtaaagttgggaaggtggagagaagtggtgggggggcattgctacttatcaaagtgccattgctactttgataatctatgtatctaaaaatgtgagatgtgcgactcttatgatactgattttcctttaatgttaatatgccagaaagcatacatctaagggaacattgtccttcaaagtagacactttgggaagttatttctttattttaatgatgtatcattgttaaaaatgctgtcaaatccttaatagctacaggagctactgagggaaatcagtgtcattatttaaagtcacgccttgtgtttttactactttattcagcaggattaaacctgaataacttttggctgttgtgctaatagtgtaaataaaataagcctgccttcataaaacactaacttttaaaaggaataaacgacttctaaaattatgcctattaacatgtgtaattagtcggcagctcaaatgtttgggagtgcaagaaattaggcaccccaggatataggtcatacagggatatataaaagccatgctcattacaaaatgagcagttgatgttttatgtggcattaagacaatcaagtcctcacaactctggaatgtcttcttatactgatgctgaatttatgaatccaaattaatttccaacaggttggaatcagatttaatgtgagatcatgatagacaagaccacagaggacgtatgctctatttcttgttggccaacagcttctttctaatgttctgtgaaaaattattttaagtgtcttatataatggtgcttttatggttattaaaaattgtaaatggtatcacatttatatggatttgtcattggatctttttttggttcaacaataaaaaaatttaattacctaaatgccaagaaactcaacaatataccagtttttctgtatcacaggcttatttaccagtcttttttttaataaataggaatcgtaaaggtaatgacaaaagcagccttataatttagttgcttatatatttgatctgtgtacatgagactgttttaacgttatctgacactactgaaacctgctcgacatctccatgactaccaacaccatgtgtaatgttttcttcactaacattttaaaaactggtatctcctttgagtaagtttggctgacaatagtaaatcccaatgaatctaaggtgttatcagctttgctaacttctgtatctccaagcacaacataaaataatctcctaatgatctacttaataatgctcccattttccaggcccaggtagtcctgggtatcttggttgatagggtggtggcataaccagctcaatatggatggcttgactcgtctgggctggtagaggggagaaatgtcagagagctcaaagtggaaattaccatcctttgatttcacatgagcggttcaaaggaccagattcaagccctcctgacttggctggctccctgctttagggtttttggctcacttgggttaagtgagtgaccactatggagaagtggctctgggttacataacttttctagagctctaaagaatagtttcctggcctatttaatgtctcttctttccctagctgacccctgaaatatttggtttgtaaaccataaaaattgattaaatgccatcaactttatcccctgtagaagtgatctgtttttcaactcccatggcttctgatttgtgtaactctttgaacacccaatattgacttgtattgtgttcgctgtttgcatcattcatagaactggcaaatgctctttatgggcaatagggtctcattaaatgattgctgaataaataacacaaatttttaccattaaaaa

SEQ ID NO: 70 - DNA, 4678 bp, Homo sapiens
cccggggggcgggcggaggaagtgagcgcagcggggaggaatgcgagcgggcggggcgtgtcggcccggggcggcggggacagcggcggggacagcggcgggcggctgggacggcgggtgcggcggggccgagcccgcacgatgcctcacttcaccgtggtgccagtggacgggccgaggcgcggcgactatgacaacctcgaggggctcagttgggtggactacggggagcgcgccgagctggatgactcggacggaagagctggacatccgcccaaaggtatcgtctcttctgggaaagctcgtcagctacaccaacctcacccagggcgccaaagagcatgaggaggccgagagtggggagggcacccgccggagggcagccgaggcacccagcatgggcaccctcatgggggtgtacctgccctgcctgcagaatatctttggggttatcctcttcctgcggctgacctggatggtgggcacagcaggtgtgctacaggccctcctcatcgtgcttatctgctgctgttgtaccctgctgacggccatctccatgagtgccatcgccaccaacggtgtggttccagctgggggctcctatttcatgatctctcgttcactggggccagaatttggaggtgctgtgggcctgtgcttctacctgggaacaacattcgcagcagccatgtacatcctgggggccatcgagatcttgctgacctacattgccccaccagctgccattttttacccatcgggtgctcatgacacgtcgaatgccactttgaacaatatgcgtgtgtatgggaccattttcctgaccttcatgaccctggtggtgtttgtgggggtcaagtatgtgaacaaatttgcctcgctcttcctggcctgtgtgatcatctccatcctctccatctatgctgggggcataaagtctatatttgaccctcccgtgtttccggtatgcatgctgggcaacaggaccctgtcccgggaccagtttgacatctgtgccaagacagctgtagtggacaatgagacagtggccacccagctatggagtttcttctgccacagccccaaccttacgaccgactcctgtgacccctacttcatgctcaacaatgtgaccgagatccctggcatccccggggcagctgctggtgtgctccaggaaaacctgtggagcgcctacctggagaagggtgacatcgtggagaagcatgggctgccctccgcagatgccccgagcctgaaggagagcctgcctctgtacgtggtcgctgacatcgccacatccttcaccgtgctggtcggcatcttcttcccttctgtaacaggcatcatggctggctcaaaccgctctggggaccttcgtgacgcccagaagtctatccctgtggggaccattctggccatcattacaacttccctcgtgtacttcagcagtgtggttctctttggtgcctgcattgagggtgtggttctccgggacaagtatggcgatggtgtcagcaggaacttggtggtgggcacactggcctggccttcaccctgggtcatcgtcatcggctccttcttttcaacgtgtggcgctggcctccagagcctcacaggggcaccacgcctattgcaggccattgccaaggacaacatcatccccttcctccgggtgtttggccacgggaaggtgaatggtgaacccacatgggcactcctcctgacggcactcatcgccgagctgggcatcctcatcgcctccctcgacatggtggcccccatcttatccatgttctttctgatgtgctacctgttcgtgaacctcgcctgtgcggtgcagacactcctgaggacccccaactggcggccccggttcaagtactatcactgggcgctgtccttcctgggcatgagtctctgcctggcccttatgtttgtctcctcctggtactatgccctggtggccatgctcatcgccggcatgatctacaaatacatcgagtaccaaggggctgagaaggagtggggtgacgggatccgaggcctgtccctgagcgctgcccgctacgcgctgttgcggctggaggaggggcctcctcacaccaagaactggcggccgcagctgctggtgctgctgaagctggacgaggacctccacgtgaagtacccgcggctcctcaccttcgcctcccagctcaaggctggcaagggcctgaccattgttggttctgtcatccaggggagcttcttggagagctatggcgaggctcaggccgccgagcagaccatcaagaacatgatggaaattgagaaggtgaagggcttctgccaggtggtggtggccagcaaggtgcgggaggggctggcccacctcatccagtcctgtggcctgggaggcatgcggcataactccgtggtgctgggctggccctacggctggcgacagagcgaggacccccgtgcctggaagaccttcattgacaccgtgcgctgcactacggctgcccacctggccctgctcgtgcccaagaacatcgccttctaccccagcaaccacgagcgctacctggagggccacatagacgtgtggtggatcgtgcacgatggtggcatgctcatgcttctgcccttcctgctgcgccagcataaggtctggaggaagtgccggatgcgcatcttcacagtggcccagatggatgacaacagcatccagatgaagaaggacctggctgtctttctgtaccatctgcgccttgaggccgaggtggaggtggtggagatgcataacagtgacatctctgcatacacctacgagcggacgctgatgatggagcagcggtcgcagatgctgcggcagatgagactgaccaagactgagcgggagcgagaagcccagctggtcaaggatcggcactcggccctgcggctggagagcctgtactcggacgaggaagatgagtctgcagtgggggctgacaagatccagatgacgtggaccagggacaagtacatgactgagacctgggaccccagccatgcccctgacaatttccgggagctggtgcacattaagccggaccaatccaatgtgcggcgcatgcacactgctgtgaagctcaatgaagtcattgtcacgcgctcccacgacgcccgcctggttctcctaaacatgcctggcccacccaggaacagtgagggcgacgagaactacatggagttcctcgaggtgctgaccgagggccttgagcgggtgctgttggtgcgcggtggtggccgtgaagtcatcaccatctactcctgagcccagtgtcatcttgtggcctggagtcgaggtcttggccaggacataacaagctgtggtctggggtaacagcctcttcccagcacccacctgccagccctgcttgcctggccctgtcctggacccagctttgctaggtctccttggaaaccaggcctgggcctcaaaatggagatggatcccaggtcttgtgggaccctgggatgtttggggactttactatctagcaccccagtaggcctgtcctggccagagaagactggtaggggccgagtggggtttgaaggcagccggcccggcccagcccaggagcgctatttattgcatatttattgtttggatgtcaccatcagagacgaagggaagggtagccagggagggagtccagcccagctgcctgcaggaagatctggctcagtctactatgggcagggccccccaccaagctgagccgaatggagacagctgagctgaggcctgactttttcaataaaacattgtgtagttctgggcctcctgctgccccggctctgtttcccctggcgccaagagaagaaggcggaactgaacccaggcccagagccggctccctgaggctgtgcccctttccggcaatctctggccacaacccccactggccaggccgtccctcccactggccctagggcccctcccactcccacaccagataaggacagcccagtgccgctttctctggcagtaggcaccagggctggaatggggccgcccggctccccatggcagtgggtgacgctgctgctggggctgctgctccctcctgccgcccccttctggctcctcaatgtgctcttccccccgcacaccacgcccaaggctgagctcagtaaccacacacggcccgtcatcctcggtaagcccccaccaggcccctgatgcaccacgccagaccctggggagcctgggccccagcccctggcagctgacctggccaaagcccttctgccctgcataagccccgacataagtacctgccctggtgtggggaggggccaaaagcttgtcccttagaggaatgacgtcccttctcccaccacactgtgactctcagttgtctaacccagggggggcggagtgggggacggggtgtgcctgaggtcttggctggggcatcacaagctgtggtcagtcacagccacaccagactctgggccaagccccaccactccttccttggcccccacccaccaaggacaagatgcccagcccaggatcggtgagcaggagaggcccatccatgcccggcccctattaggcccagcccccatgcccccagacctatctgttcccaccttggactttggcaataaaggagcgccagactgggaaaaaaaa

SEQ ID NO: 71 - DNA, 4755 bp, Homo sapiens
cccggggggcgggcggaggaagtgagcgcagcggggaggaatgcgagcgggcggggcgtgtcggcccggggcggcggggacagcggcggggacagcggcgggcggctgggacggcgggtgcggcggggccgagcccgcacgatgcctcacttcaccgtggtgccagtggacgggccgaggcgcggcgactatgacaacctcgaggggctcagttgggtggactacggggagcgcgccgagctggatgactcggacggacatggcaaccacagagagagcagcccttttctttcccccttggaggcttccagaggaattgactactatgacaggaacctggcactgtttgaggaagagctggacatccgcccaaaggtatcgtctcttctgggaaagctcgtcagctacaccaacctcacccagggcgccaaagagcatgaggaggccgagagtggggagggcacccgccggagggcagccgaggcacccagcatgggcaccctcatgggggtgtacctgccctgcctgcagaatatctttggggttatcctcttcctgcggctgacctggatggtgggcacagcaggtgtgctacaggccctcctcatcgtgcttatctgctgctgttgtaccctgctgacggccatctccatgagtgccatcgccaccaacggtgtggttccagctgggggctcctatttcatgatctctcgttcactggggccagaatttggaggtgctgtgggcctgtgcttctacctgggaacaacattcgcagcagccatgtacatcctgggggccatcgagatcttgctgacctacattgccccaccagctgccattttttacccatcgggtgctcatgacacgtcgaatgccactttgaacaatatgcgtgtgtatgggaccattttcctgaccttcatgaccctggtggtgtttgtgggggtcaagtatgtgaacaaatttgcctcgctcttcctggcctgtgtgatcatctccatcctctccatctatgctgggggcataaagtctatatttgaccctcccgtgtttccggtatgcatgctgggcaacaggaccctgtcccgggaccagtttgacatctgtgccaagacagctgtagtggacaatgagacagtggccacccagctatggagtttcttctgccacagccccaaccttacgaccgactcctgtgacccctacttcatgctcaacaatgtgaccgagatccctggcatccccggggcagctgctggtgtgctccaggaaaacctgtggagcgcctacctggagaagggtgacatcgtggagaagcatgggctgccctccgcagatgccccgagcctgaaggagagcctgcctctgtacgtggtcgctgacatcgccacatccttcaccgtgctggtcggcatcttcttcccttctgtaacaggcatcatggctggctcaaaccgctctggggaccttcgtgacgcccagaagtctatccctgtggggaccattctggccatcattacaacttccctcgtgtacttcagcagtgtggttctctttggtgcctgcattgagggtgtggttctccgggacaagtatggcgatggtgtcagcaggaacttggtggtgggcacactggcctggccttcaccctgggtcatcgtcatcggctccttcttttcaacgtgtggcgctggcctccagagcctcacaggggcaccacgcctattgcaggccattgccaaggacaacatcatccccttcctccgggtgtttggccacgggaaggtgaatggtgaacccacatgggcactcctcctgacggcactcatcgccgagctgggcatcctcatcgcctccctcgacatggtggcccccatcttatccatgttctttctgatgtgctacctgttcgtgaacctcgcctgtgcggtgcagacactcctgaggacccccaactggcggccccggttcaagtactatcactgggcgctgtccttcctgggcatgagtctctgcctggcccttatgtttgtctcctcctggtactatgccctggtggccatgctcatcgccggcatgatctacaaatacatcgagtaccaaggggctgagaaggagtggggtgacgggatccgaggcctgtccctgagcgctgcccgctacgcgctgttgcggctggaggaggggcctcctcacaccaagaactggcggccgcagctgctggtgctgctgaagctggacgaggacctccacgtgaagtacccgcggctcctcaccttcgcctcccagctcaaggctggcaagggcctgaccattgttggttctgtcatccaggggagcttcttggagagctatggcgaggctcaggccgccgagcagaccatcaagaacatgatggaaattgagaaggtgaagggcttctgccaggtggtggtggccagcaaggtgcgggaggggctggcccacctcatccagtcctgtggcctgggaggcatgcggcataactccgtggtgctgggctggccctacggctggcgacagagcgaggacccccgtgcctggaagaccttcattgacaccgtgcgctgcactacggctgcccacctggccctgctcgtgcccaagaacatcgccttctaccccagcaaccacgagcgctacctggagggccacatagacgtgtggtggatcgtgcacgatggtggcatgctcatgcttctgcccttcctgctgcgccagcataaggtctggaggaagtgccggatgcgcatcttcacagtggcccagatggatgacaacagcatccagatgaagaaggacctggctgtctttctgtaccatctgcgccttgaggccgagcataacagtgacatctctgcatacacctacgagcggacgctgatgatggagcagcggtcgcagatgctgcggcagatgagactgaccaagactgagcgggagcgagaagcccagctggtcaaggatcggcactcggccctgcggctggagagcctgtactcggacgaggaagatgagtctgcagtgggggctgacaagatccagatgacgtggaccagggacaagtacatgactgagacctgggaccccagccatgcccctgacaatttccgggagctggtgcacattaagccggaccaatccaatgtgcggcgcatgcacactgctgtgaagctcaatgaagtcattgtcacgcgctcccacgacgcccgcctggttctcctaaacatgcctggcccacccaggaacagtgagggcgacgagaactacatggagttcctcgaggtgctgaccgagggccttgagcgggtgctgttggtgcgcggtggtggccgtgaagtcatcaccatctactcctgagcccagtgtcatcttgtggcctggagtcgaggtcttggccaggacataacaagctgtggtctggggtaacagcctcttcccagcacccacctgccagccctgcttgcctggccctgtcctggacccagctttgctaggtctccttggaaaccaggcctgggcctcaaaatggagatggatcccaggtcttgtgggaccctgggatgtttggggactttactatctagcaccccagtaggcctgtcctggccagagaagactggtaggggccgagtggggtttgaaggcagccggcccggcccagcccaggagcgctatttattgcatatttattgtttggatgtcaccatcagagacgaagggaagggtagccagggagggagtccagcccagctgcctgcaggaagatctggctcagtctactatgggcagggccccccaccaagctgagccgaatggagacagctgagctgaggcctgactttttcaataaaacattgtgtagttctgggcctcctgctgccccggctctgtttcccctggcgccaagagaagaaggcggaactgaacccaggcccagagccggctccctgaggctgtgcccctttccggcaatctctggccacaacccccactggccaggccgtccctcccactggccctagggcccctcccactcccacaccagataaggacagcccagtgccgctttctctggcagtaggcaccagggctggaatggggccgcccggctccccatggcagtgggtgacgctgctgctggggctgctgctccctcctgccgcccccttctggctcctcaatgtgctcttccccccgcacaccacgcccaaggctgagctcagtaaccacacacggcccgtcatcctcggtaagcccccaccaggcccctgatgcaccacgccagaccctggggagcctgggccccagcccctggcagctgacctggccaaagcccttctgccctgcataagccccgacataagtacctgccctggtgtggggaggggccaaaagcttgtcccttagaggaatgacgtcccttctcccaccacactgtgactctcagttgtctaacccagggggggcggagtgggggacggggtgtgcctgaggtcttggctggggcatcacaagctgtggtcagtcacagccacaccagactctgggccaagccccaccactccttccttggcccccacccaccaaggacaagatgcccagcccaggatcggtgagcaggagaggcccatccatgcccggcccctattaggcccagcccccatgcccccagacctatctgttcccaccttggactttggcaataaaggagcgccagactgggaaaaaaaa

SEQ ID NO: 72 - DNA, 4773 bp, Homo sapiens
cccggggggcgggcggaggaagtgagcgcagcggggaggaatgcgagcgggcggggcgtgtcggcccggggcggcggggacagcggcggggacagcggcgggcggctgggacggcgggtgcggcggggccgagcccgcacgatgcctcacttcaccgtggtgccagtggacgggccgaggcgcggcgactatgacaacctcgaggggctcagttgggtggactacggggagcgcgccgagctggatgactcggacggacatggcaaccacagagagagcagcccttttctttcccccttggaggcttccagaggaattgactactatgacaggaacctggcactgtttgaggaagagctggacatccgcccaaaggtatcgtctcttctgggaaagctcgtcagctacaccaacctcacccagggcgccaaagagcatgaggaggccgagagtggggagggcacccgccggagggcagccgaggcacccagcatgggcaccctcatgggggtgtacctgccctgcctgcagaatatctttggggttatcctcttcctgcggctgacctggatggtgggcacagcaggtgtgctacaggccctcctcatcgtgcttatctgctgctgttgtaccctgctgacggccatctccatgagtgccatcgccaccaacggtgtggttccagctgggggctcctatttcatgatctctcgttcactggggccagaatttggaggtgctgtgggcctgtgcttctacctgggaacaacattcgcagcagccatgtacatcctgggggccatcgagatcttgctgacctacattgccccaccagctgccattttttacccatcgggtgctcatgacacgtcgaatgccactttgaacaatatgcgtgtgtatgggaccattttcctgaccttcatgaccctggtggtgtttgtgggggtcaagtatgtgaacaaatttgcctcgctcttcctggcctgtgtgatcatctccatcctctccatctatgctgggggcataaagtctatatttgaccctcccgtgtttccggtatgcatgctgggcaacaggaccctgtcccgggaccagtttgacatctgtgccaagacagctgtagtggacaatgagacagtggccacccagctatggagtttcttctgccacagccccaaccttacgaccgactcctgtgacccctacttcatgctcaacaatgtgaccgagatccctggcatccccggggcagctgctggtgtgctccaggaaaacctgtggagcgcctacctggagaagggtgacatcgtggagaagcatgggctgccctccgcagatgccccgagcctgaaggagagcctgcctctgtacgtggtcgctgacatcgccacatccttcaccgtgctggtcggcatcttcttcccttctgtaacaggcatcatggctggctcaaaccgctctggggaccttcgtgacgcccagaagtctatccctgtggggaccattctggccatcattacaacttccctcgtgtacttcagcagtgtggttctctttggtgcctgcattgagggtgtggttctccgggacaagtatggcgatggtgtcagcaggaacttggtggtgggcacactggcctggccttcaccctgggtcatcgtcatcggctccttcttttcaacgtgtggcgctggcctccagagcctcacaggggcaccacgcctattgcaggccattgccaaggacaacatcatccccttcctccgggtgtttggccacgggaaggtgaatggtgaacccacatgggcactcctcctgacggcactcatcgccgagctgggcatcctcatcgcctccctcgacatggtggcccccatcttatccatgttctttctgatgtgctacctgttcgtgaacctcgcctgtgcggtgcagacactcctgaggacccccaactggcggccccggttcaagtactatcactgggcgctgtccttcctgggcatgagtctctgcctggcccttatgtttgtctcctcctggtactatgccctggtggccatgctcatcgccggcatgatctacaaatacatcgagtaccaaggggctgagaaggagtggggtgacgggatccgaggcctgtccctgagcgctgcccgctacgcgctgttgcggctggaggaggggcctcctcacaccaagaactggcggccgcagctgctggtgctgctgaagctggacgaggacctccacgtgaagtacccgcggctcctcaccttcgcctcccagctcaaggctggcaagggcctgaccattgttggttctgtcatccaggggagcttcttggagagctatggcgaggctcaggccgccgagcagaccatcaagaacatgatggaaattgagaaggtgaagggcttctgccaggtggtggtggccagcaaggtgcgggaggggctggcccacctcatccagtcctgtggcctgggaggcatgcggcataactccgtggtgctgggctggccctacggctggcgacagagcgaggacccccgtgcctggaagaccttcattgacaccgtgcgctgcactacggctgcccacctggccctgctcgtgcccaagaacatcgccttctaccccagcaaccacgagcgctacctggagggccacatagacgtgtggtggatcgtgcacgatggtggcatgctcatgcttctgcccttcctgctgcgccagcataaggtctggaggaagtgccggatgcgcatcttcacagtggcccagatggatgacaacagcatccagatgaagaaggacctggctgtctttctgtaccatctgcgccttgaggccgaggtggaggtggtggagatgcataacagtgacatctctgcatacacctacgagcggacgctgatgatggagcagcggtcgcagatgctgcggcagatgagactgaccaagactgagcgggagcgagaagcccagctggtcaaggatcggcactcggccctgcggctggagagcctgtactcggacgaggaagatgagtctgcagtgggggctgacaagatccagatgacgtggaccagggacaagtacatgactgagacctgggaccccagccatgcccctgacaatttccgggagctggtgcacattaagccggaccaatccaatgtgcggcgcatgcacactgctgtgaagctcaatgaagtcattgtcacgcgctcccacgacgcccgcctggttctcctaaacatgcctggcccacccaggaacagtgagggcgacgagaactacatggagttcctcgaggtgctgaccgagggccttgagcgggtgctgttggtgcgcggtggtggccgtgaagtcatcaccatctactcctgagcccagtgtcatcttgtggcctggagtcgaggtcttggccaggacataacaagctgtggtctggggtaacagcctcttcccagcacccacctgccagccctgcttgcctggccctgtcctggacccagctttgctaggtctccttggaaaccaggcctgggcctcaaaatggagatggatcccaggtcttgtgggaccctgggatgtttggggactttactatctagcaccccagtaggcctgtcctggccagagaagactggtaggggccgagtggggtttgaaggcagccggcccggcccagcccaggagcgctatttattgcatatttattgtttggatgtcaccatcagagacgaagggaagggtagccagggagggagtccagcccagctgcctgcaggaagatctggctcagtctactatgggcagggccccccaccaagctgagccgaatggagacagctgagctgaggcctgactttttcaataaaacattgtgtagttctgggcctcctgctgccccggctctgtttcccctggcgccaagagaagaaggcggaactgaacccaggcccagagccggctccctgaggctgtgcccctttccggcaatctctggccacaacccccactggccaggccgtccctcccactggccctagggcccctcccactcccacaccagataaggacagcccagtgccgctttctctggcagtaggcaccagggctggaatggggccgcccggctccccatggcagtgggtgacgctgctgctggggctgctgctccctcctgccgcccccttctggctcctcaatgtgctcttccccccgcacaccacgcccaaggctgagctcagtaaccacacacggcccgtcatcctcggtaagcccccaccaggcccctgatgcaccacgccagaccctggggagcctgggccccagcccctggcagctgacctggccaaagcccttctgccctgcataagccccgacataagtacctgccctggtgtggggaggggccaaaagcttgtcccttagaggaatgacgtcccttctcccaccacactgtgactctcagttgtctaacccagggggggcggagtgggggacggggtgtgcctgaggtcttggctggggcatcacaagctgtggtcagtcacagccacaccagactctgggccaagccccaccactccttccttggcccccacccaccaaggacaagatgcccagcccaggatcggtgagcaggagaggcccatccatgcccggcccctattaggcccagcccccatgcccccagacctatctgttcccaccttggactttggcaataaaggagcgccagactgggaaaaaaaa

SEQ ID NO: 73 - DNA, 4643 bp, Homo sapiens
gagtcctgctagatccccgcaagctaggccagctcctcccactgcctcccttcctctttctcctcctcttactcctttccagccagaccttggctgtctacaggatgggggacaccctgagccccggacatggcaaccacagagagagcagcccttttctttcccccttggaggcttccagaggaattgactactatgacaggaacctggcactgtttgaggaagagctggacatccgcccaaaggtatcgtctcttctgggaaagctcgtcagctacaccaacctcacccagggcgccaaagagcatgaggaggccgagagtggggagggcacccgccggagggcagccgaggcacccagcatgggcaccctcatgggggtgtacctgccctgcctgcagaatatctttggggttatcctcttcctgcggctgacctggatggtgggcacagcaggtgtgctacaggccctcctcatcgtgcttatctgctgctgttgtaccctgctgacggccatctccatgagtgccatcgccaccaacggtgtggttccagctgggggctcctatttcatgatctctcgttcactggggccagaatttggaggtgctgtgggcctgtgcttctacctgggaacaacattcgcagcagccatgtacatcctgggggccatcgagatcttgctgacctacattgccccaccagctgccattttttacccatcgggtgctcatgacacgtcgaatgccactttgaacaatatgcgtgtgtatgggaccattttcctgaccttcatgaccctggtggtgtttgtgggggtcaagtatgtgaacaaatttgcctcgctcttcctggcctgtgtgatcatctccatcctctccatctatgctgggggcataaagtctatatttgaccctcccgtgtttccggtatgcatgctgggcaacaggaccctgtcccgggaccagtttgacatctgtgccaagacagctgtagtggacaatgagacagtggccacccagctatggagtttcttctgccacagccccaaccttacgaccgactcctgtgacccctacttcatgctcaacaatgtgaccgagatccctggcatccccggggcagctgctggtgtgctccaggaaaacctgtggagcgcctacctggagaagggtgacatcgtggagaagcatgggctgccctccgcagatgccccgagcctgaaggagagcctgcctctgtacgtggtcgctgacatcgccacatccttcaccgtgctggtcggcatcttcttcccttctgtaacaggcatcatggctggctcaaaccgctctggggaccttcgtgacgcccagaagtctatccctgtggggaccattctggccatcattacaacttccctcgtgtacttcagcagtgtggttctctttggtgcctgcattgagggtgtggttctccgggacaagtatggcgatggtgtcagcaggaacttggtggtgggcacactggcctggccttcaccctgggtcatcgtcatcggctccttcttttcaacgtgtggcgctggcctccagagcctcacaggggcaccacgcctattgcaggccattgccaaggacaacatcatccccttcctccgggtgtttggccacgggaaggtgaatggtgaacccacatgggcactcctcctgacggcactcatcgccgagctgggcatcctcatcgcctccctcgacatggtggcccccatcttatccatgttctttctgatgtgctacctgttcgtgaacctcgcctgtgcggtgcagacactcctgaggacccccaactggcggccccggttcaagtactatcactgggcgctgtccttcctgggcatgagtctctgcctggcccttatgtttgtctcctcctggtactatgccctggtggccatgctcatcgccggcatgatctacaaatacatcgagtaccaaggggctgagaaggagtggggtgacgggatccgaggcctgtccctgagcgctgcccgctacgcgctgttgcggctggaggaggggcctcctcacaccaagaactggcggccgcagctgctggtgctgctgaagctggacgaggacctccacgtgaagtacccgcggctcctcaccttcgcctcccagctcaaggctggcaagggcctgaccattgttggttctgtcatccaggggagcttcttggagagctatggcgaggctcaggccgccgagcagaccatcaagaacatgatggaaattgagaaggtgaagggcttctgccaggtggtggtggccagcaaggtgcgggaggggctggcccacctcatccagtcctgtggcctgggaggcatgcggcataactccgtggtgctgggctggccctacggctggcgacagagcgaggacccccgtgcctggaagaccttcattgacaccgtgcgctgcactacggctgcccacctggccctgctcgtgcccaagaacatcgccttctaccccagcaaccacgagcgctacctggagggccacatagacgtgtggtggatcgtgcacgatggtggcatgctcatgcttctgcccttcctgctgcgccagcataaggtctggaggaagtgccggatgcgcatcttcacagtggcccagatggatgacaacagcatccagatgaagaaggacctggctgtctttctgtaccatctgcgccttgaggccgaggtggaggtggtggagatgcataacagtgacatctctgcatacacctacgagcggacgctgatgatggagcagcggtcgcagatgctgcggcagatgagactgaccaagactgagcgggagcgagaagcccagctggtcaaggatcggcactcggccctgcggctggagagcctgtactcggacgaggaagatgagtctgcagtgggggctgacaagatccagatgacgtggaccagggacaagtacatgactgagacctgggaccccagccatgcccctgacaatttccgggagctggtgcacattaagccggaccaatccaatgtgcggcgcatgcacactgctgtgaagctcaatgaagtcattgtcacgcgctcccacgacgcccgcctggttctcctaaacatgcctggcccacccaggaacagtgagggcgacgagaactacatggagttcctcgaggtgctgaccgagggccttgagcgggtgctgttggtgcgcggtggtggccgtgaagtcatcaccatctactcctgagcccagtgtcatcttgtggcctggagtcgaggtcttggccaggacataacaagctgtggtctggggtaacagcctcttcccagcacccacctgccagccctgcttgcctggccctgtcctggacccagctttgctaggtctccttggaaaccaggcctgggcctcaaaatggagatggatcccaggtcttgtgggaccctgggatgtttggggactttactatctagcaccccagtaggcctgtcctggccagagaagactggtaggggccgagtggggtttgaaggcagccggcccggcccagcccaggagcgctatttattgcatatttattgtttggatgtcaccatcagagacgaagggaagggtagccagggagggagtccagcccagctgcctgcaggaagatctggctcagtctactatgggcagggccccccaccaagctgagccgaatggagacagctgagctgaggcctgactttttcaataaaacattgtgtagttctgggcctcctgctgccccggctctgtttcccctggcgccaagagaagaaggcggaactgaacccaggcccagagccggctccctgaggctgtgcccctttccggcaatctctggccacaacccccactggccaggccgtccctcccactggccctagggcccctcccactcccacaccagataaggacagcccagtgccgctttctctggcagtaggcaccagggctggaatggggccgcccggctccccatggcagtgggtgacgctgctgctggggctgctgctccctcctgccgcccccttctggctcctcaatgtgctcttccccccgcacaccacgcccaaggctgagctcagtaaccacacacggcccgtcatcctcggtaagcccccaccaggcccctgatgcaccacgccagaccctggggagcctgggccccagcccctggcagctgacctggccaaagcccttctgccctgcataagccccgacataagtacctgccctggtgtggggaggggccaaaagcttgtcccttagaggaatgacgtcccttctcccaccacactgtgactctcagttgtctaacccagggggggcggagtgggggacggggtgtgcctgaggtcttggctggggcatcacaagctgtggtcagtcacagccacaccagactctgggccaagccccaccactccttccttggcccccacccaccaaggacaagatgcccagcccaggatcggtgagcaggagaggcccatccatgcccggcccctattaggcccagcccccatgcccccagacctatctgttcccaccttggactttggcaataaaggagcgccagactgggaaaaaaaa

SEQ ID NO: 74 - DNA, 4652 bp, Homo sapiens
agtgcatggtggggtagccagccggccacctttgggccatggcagccgaaggtgctgtgtgcggcttcgtctatctggagggcactgcctgggcggtccctgaggacaccgaacccttggcatcctgcacattgggacatggcaaccacagagagagcagcccttttctttcccccttggaggcttccagaggaattgactactatgacaggaacctggcactgtttgaggaagagctggacatccgcccaaaggtatcgtctcttctgggaaagctcgtcagctacaccaacctcacccagggcgccaaagagcatgaggaggccgagagtggggagggcacccgccggagggcagccgaggcacccagcatgggcaccctcatgggggtgtacctgccctgcctgcagaatatctttggggttatcctcttcctgcggctgacctggatggtgggcacagcaggtgtgctacaggccctcctcatcgtgcttatctgctgctgttgtaccctgctgacggccatctccatgagtgccatcgccaccaacggtgtggttccagctgggggctcctatttcatgatctctcgttcactggggccagaatttggaggtgctgtgggcctgtgcttctacctgggaacaacattcgcagcagccatgtacatcctgggggccatcgagatcttgctgacctacattgccccaccagctgccattttttacccatcgggtgctcatgacacgtcgaatgccactttgaacaatatgcgtgtgtatgggaccattttcctgaccttcatgaccctggtggtgtttgtgggggtcaagtatgtgaacaaatttgcctcgctcttcctggcctgtgtgatcatctccatcctctccatctatgctgggggcataaagtctatatttgaccctcccgtgtttccggtatgcatgctgggcaacaggaccctgtcccgggaccagtttgacatctgtgccaagacagctgtagtggacaatgagacagtggccacccagctatggagtttcttctgccacagccccaaccttacgaccgactcctgtgacccctacttcatgctcaacaatgtgaccgagatccctggcatccccggggcagctgctggtgtgctccaggaaaacctgtggagcgcctacctggagaagggtgacatcgtggagaagcatgggctgccctccgcagatgccccgagcctgaaggagagcctgcctctgtacgtggtcgctgacatcgccacatccttcaccgtgctggtcggcatcttcttcccttctgtaacaggcatcatggctggctcaaaccgctctggggaccttcgtgacgcccagaagtctatccctgtggggaccattctggccatcattacaacttccctcgtgtacttcagcagtgtggttctctttggtgcctgcattgagggtgtggttctccgggacaagtatggcgatggtgtcagcaggaacttggtggtgggcacactggcctggccttcaccctgggtcatcgtcatcggctccttcttttcaacgtgtggcgctggcctccagagcctcacaggggcaccacgcctattgcaggccattgccaaggacaacatcatccccttcctccgggtgtttggccacgggaaggtgaatggtgaacccacatgggcactcctcctgacggcactcatcgccgagctgggcatcctcatcgcctccctcgacatggtggcccccatcttatccatgttctttctgatgtgctacctgttcgtgaacctcgcctgtgcggtgcagacactcctgaggacccccaactggcggccccggttcaagtactatcactgggcgctgtccttcctgggcatgagtctctgcctggcccttatgtttgtctcctcctggtactatgccctggtggccatgctcatcgccggcatgatctacaaatacatcgagtaccaaggggctgagaaggagtggggtgacgggatccgaggcctgtccctgagcgctgcccgctacgcgctgttgcggctggaggaggggcctcctcacaccaagaactggcggccgcagctgctggtgctgctgaagctggacgaggacctccacgtgaagtacccgcggctcctcaccttcgcctcccagctcaaggctggcaagggcctgaccattgttggttctgtcatccaggggagcttcttggagagctatggcgaggctcaggccgccgagcagaccatcaagaacatgatggaaattgagaaggtgaagggcttctgccaggtggtggtggccagcaaggtgcgggaggggctggcccacctcatccagtcctgtggcctgggaggcatgcggcataactccgtggtgctgggctggccctacggctggcgacagagcgaggacccccgtgcctggaagaccttcattgacaccgtgcgctgcactacggctgcccacctggccctgctcgtgcccaagaacatcgccttctaccccagcaaccacgagcgctacctggagggccacatagacgtgtggtggatcgtgcacgatggtggcatgctcatgcttctgcccttcctgctgcgccagcataaggtctggaggaagtgccggatgcgcatcttcacagtggcccagatggatgacaacagcatccagatgaagaaggacctggctgtctttctgtaccatctgcgccttgaggccgaggtggaggtggtggagatgcataacagtgacatctctgcatacacctacgagcggacgctgatgatggagcagcggtcgcagatgctgcggcagatgagactgaccaagactgagcgggagcgagaagcccagctggtcaaggatcggcactcggccctgcggctggagagcctgtactcggacgaggaagatgagtctgcagtgggggctgacaagatccagatgacgtggaccagggacaagtacatgactgagacctgggaccccagccatgcccctgacaatttccgggagctggtgcacattaagccggaccaatccaatgtgcggcgcatgcacactgctgtgaagctcaatgaagtcattgtcacgcgctcccacgacgcccgcctggttctcctaaacatgcctggcccacccaggaacagtgagggcgacgagaactacatggagttcctcgaggtgctgaccgagggccttgagcgggtgctgttggtgcgcggtggtggccgtgaagtcatcaccatctactcctgagcccagtgtcatcttgtggcctggagtcgaggtcttggccaggacataacaagctgtggtctggggtaacagcctcttcccagcacccacctgccagccctgcttgcctggccctgtcctggacccagctttgctaggtctccttggaaaccaggcctgggcctcaaaatggagatggatcccaggtcttgtgggaccctgggatgtttggggactttactatctagcaccccagtaggcctgtcctggccagagaagactggtaggggccgagtggggtttgaaggcagccggcccggcccagcccaggagcgctatttattgcatatttattgtttggatgtcaccatcagagacgaagggaagggtagccagggagggagtccagcccagctgcctgcaggaagatctggctcagtctactatgggcagggccccccaccaagctgagccgaatggagacagctgagctgaggcctgactttttcaataaaacattgtgtagttctgggcctcctgctgccccggctctgtttcccctggcgccaagagaagaaggcggaactgaacccaggcccagagccggctccctgaggctgtgcccctttccggcaatctctggccacaacccccactggccaggccgtccctcccactggccctagggcccctcccactcccacaccagataaggacagcccagtgccgctttctctggcagtaggcaccagggctggaatggggccgcccggctccccatggcagtgggtgacgctgctgctggggctgctgctccctcctgccgcccccttctggctcctcaatgtgctcttccccccgcacaccacgcccaaggctgagctcagtaaccacacacggcccgtcatcctcggtaagcccccaccaggcccctgatgcaccacgccagaccctggggagcctgggccccagcccctggcagctgacctggccaaagcccttctgccctgcataagccccgacataagtacctgccctggtgtggggaggggccaaaagcttgtcccttagaggaatgacgtcccttctcccaccacactgtgactctcagttgtctaacccagggggggcggagtgggggacggggtgtgcctgaggtcttggctggggcatcacaagctgtggtcagtcacagccacaccagactctgggccaagccccaccactccttccttggcccccacccaccaaggacaagatgcccagcccaggatcggtgagcaggagaggcccatccatgcccggcccctattaggcccagcccccatgcccccagacctatctgttcccaccttggactttggcaataaaggagcgccagactgggaaaaaaaa

SEQ ID NO: 75 - DNA, 6236 bp, Homo sapiens
ggctcttctcggggagtggagtgctatgacagatgagactttcatgcaagaaaataaatcctgcacatttgatgtactgctttaaacttaaagacctctttggacccgaaattgtaagatcctgagtggcaactggaaaggattcgtggttacttggatctaggaaaatcctgttttatctctgatgggactaagacaaagcactcctgttagtacaacccagcttgcgttcctccctgcctgcagaggaagcatttggatgcttcccttcccgttggaagttgccagtctctcttcagagtgatgagggcagaactggtcattacggaaagagtcggaggaacggtgccacagcatcaggttcaggttaaccacctgggacggtaaactaccgaagtctgcttctgcttccaaaggagaaccgcagtgaaaggattctataaacctggagagtaatcctaagaaaaatcatcagaagaaaggaatttgtagaactaaaactgcaaacatccagaatcttgatggtgtgccaagccaaatgtcaactggaactcaaccaaaaactaaagtgctctctgataacagacccaaagaaagagtggaaattgaggcaaaagaagcatgtgactggctccgtgctgccgggttcccgcaatacgctcagttatatgaggattcacaatttcccatcaacattgtggctgtcaagaatgatcatgattttcttgaaaaggaccttgtagaacctctttgcagacgactaaatacgttgaacaagtgtgcctcaatgaaacttgatgtgaacttccaaaggaaaaagggtgacgactccgatgaggaagatctttgtatcagcaacaaatggactttccaaagaaccagtcgcaggtggtctcgtgtggacgacctctacacgctgctccctcgaggagacagaaatgggtcaccgggaggcacggggatgaggaacacgaccagcagtgagagcgtcctcacagacctgagcgagcctgaggtctgctccattcacagcgaaagcagtggaggcagcgacagtcgcagccagccgggccagtgctgtacagacaacccggtcatgctggatgccccactcgtcagcagcagcctcccacagccccccagagatgtcctcaaccaccccttccaccccaagaatgagaagcccacgagggctagggccaaatcatttttgaaacgcatggaaacactccgagggaagggagcccacgggaggcataaggggtctgggcggacaggtggcctggtgatcagtgggcccatgttgcagcaggagccagagtcctttaaggctatgcagtgcatccaaataccaaatggagatctccagaattcgccgccacctgcctgcagaaaagggctcccatgctctggcaagtcgagtggcgagagcagcccgtcggagcacagcagcagcggggtgagcacgccctgcctgaaggaacgcaagtgccacgaggccaacaagcgcgggggcatgtacttggaggacctagatgtgctggcggggacagcactgccggatgcaggggaccaaagccgtatgcatgaatttcactcccaagagaatttggtggtgcatattcccaaggatcacaaaccaggaacattccccaaggcactttctattgaaagcctctctcccacagatagtagcaatggggttaattggaggaccggtagcatctccctgggcagagagcaggtccctggtgccagggagccccggctcatggcgtcctgccacagagccagccgagtcagtatctatgacaatgtccctggctcccatctgtatgccagcacaggagatcttttggacttggagaaagatgaccttttccctcacttggatgacattctgcagcatgtcaatgggctccaagaggtagtcgatgactggtccaaagatgtcttgcctgaactgcaaactcatgatacattggttggggaacctggcttatccacctttccatctcctaatcagatcaccttagattttgaaggtaactctgtctcagaaggtcggacgacacccagtgatgtggaaagagatgtaacatctcttaatgaatctgagcctcctggggtcagagacaggagggattctggtgtaggggcctctctgaccaggccaaacaggcgactccgatggaacagtttccagctgtcgcaccagccccggccggccccagcatcgccccacatcagcagccagacggccagccagctgagcctgctccagcgcttctcactgctccgcctcacggccatcatggagaagcactccatgtccaacaagcacggctggacatggtcagttccaaagttcatgaagaggatgaaagttcccgactacaaagacaaggctgtctttggcgttcctctcatagtccacgtccaaagaacgggacagcccctgcctcaaagtattcagcaagcactgagatatctacgcagcaactgcctcgatcaggtgggtctttttcgcaaatcaggagtgaagtctcgaatccatgcccttcgccaaatgaatgaaaacttccctgagaacgtcaactatgaagaccagtctgcttatgatgtggcggatatggtgaaacagttcttccgggacctccctgagcctcttttcaccaacaagctcagtgagacctttctccatatctatcagtatgtctccaaagagcagcggctgcaggccgtgcaggctgccatcctgctactggccgatgagaacagggaggtcctgcagacgctcttgtgtttcctgaacgacgtcgtcaacttggtggaagagaatcagatgacgcccatgaacctggcagtgtgtctggccccctccctctttcatcttaatttattgaagaaagaaagctctccacgagtcatacagaagaaatatgccactgggaagccagatcaaaaggacctcaacgagaatctggcagcagctcaggggctagcgcacatgatcatggaatgcgacagactttttgaggttccacacgagttggtggcccagtctcgtaactcgtatgtggaggctgagatccacgtgccaaccctggaagaattggggacacagctggaggagagtggggcaactttccacacttacctgaaccatctcatccagggcctccagaaagaagccaaggagaagttcaaaggatgggtcacgtgctccagcacggacaatacagatcttgctttcaaaaaggtgggcgacgggaacccgctgaagctgtggaaggcttctgtggaggtggaagcacccccctcagtggtcctgaaccgcgtgctgagagagcgccacctgtgggacgaggactttgtgcagtggaaggttgtggaaactctagacaggcaaacagagatctaccagtatgtgctgaacagcatggctccccatccttccagagactttgtggttctcaggacctggaaaactgatttgcccaaaggaatgtgtaccctggtgtccctctccgtggagcatgaggaagcccagctcctgggtggtgtgcgagcagtggtgatggactcgcagtacttgatagaaccgtgtggctctggcaagtcaagactgactcacatctgcaggatagacctgaaaggtcactccccagaatggtacagcaaaggctttggacatctgtgtgcagcagaagttgccaggattagaaactctttccagcccctcattgctgagggcccagaaactaaaatctgagttttgcccagtgtgacatcaaactcagggaagaggaagctaaagtgacgagtgtggcagagagtgtgcatgtgagaaagcgagagaaagaggaactgaaggacgcggttaatgcctaaaaatggaaacgttaagaagttggaatgttggagatgcaagaatttccaagaactttcttagccttcctggagatggctacatccctactaatataattttaaaatgagaactttatatatattacttaaaattaaatggactattccttgtgcattgcctaatttgctatttaaaggcttctaagaagcgtatacctaactgtaaataaatgtatgtatagcatatgtacatatgtgtgtatatctccatctttactgtatatatgtaaaataccaattttatatagaattgtgtgttttgaaaatgacggtgtctgactcagtgagtcccttcctcacacagttctttccaagtggctctgggccccatctctccactgtcctgtaagctgtgcagaacctgctgctaacaccaaggtgtgaacatgccctgatgcctaaccaaagatgagttaaccaaaggaaaataacattaaaggagacttatgtgttaacgctttgtttctgctattcaaaaactgagagtggagatctgggataaagcaaggaaataataattactcctccttaaagcaaatgggggggtgagaagtcattaccaaatttaaagctagatgaggagttgccactgggcccagtaagatggaatttcagtgagatatggaccaccggagtcagcgagagtgactgaaacagaagcgatacctctcgctcccatgcccatcactacagaccccaagtcaagatgaatatcatagcctttacttcttcacagccaaagggagcccctgtgttgtctcaagtttttataaatacatttcataatgttattaaatgtcattctatttgaccagtggcctatttggtcacagttaattggtgttttcttattgcactgaattcaactccagacaccatacaaagggagatgatggccattccgttcaaatcctagatcgttacagcttcagggaattcatattttgttatgtgtaggatactcttaaaatgtaattcattaaacttttacaatctgaaagacagggtttttaactaacatgagaccaaaactatgttctttgattagttttagatagtataatcgggtttattaattcttctgtgtttcttcactagccagtccaagctacctatgcatttgacccaaccttatttattattgtacagatgaagcgaattgactccctttagccaactgctaatggatcgaatgtgctttttattgtaattcaacagctatagagagaaagataacttattgtgtgtttgatttcagggagagagattttctttggtcatccataatagagattgataagatttagcaactggtgttggagaaaaaaagaaaagcaaatgagtgttttcaggtttttttgcattatatgcatttatgtaatgtttctgttatcagcaatgtgcaattattttattgagaggaataaaaaagctttctatgagtttggtatggtgcgaggaaaatcttacagtttgaattatgacctagaaatttttcattcccatatctacctaagaaggaagcagtaaatccataatttaccttttgggcaatgctttgtgagcaaaacaaagtcacttctgccataacatcttgaatttaaccatatatgccagattactttatatgcatcaacaagatcaccagtgaagtttaatctagctaaacactggtcctgctcctgagatgggatcctatgtgtttggaaaacgtgataggcacacgaggatgagtggctttgtatcgcccagagaggtgcttgtccagatttcacatgcacatgaattgcctggggatcttgtgaaactgcagactctgctccaagtaatctgggctgggcctgagattctgcatttctaaggagtctcagggatgcctatgctgctggcctaaaaccacactcagaaacgaggacctagaagatccctaaaacagaataagaacaaatgtgattgtatttctgattctccctctcttcgaattatctgacttttttgtttttgtgcacatagtaatcatatcaccgctgcataacaacacagtgcatctttttaaaacaaggaaaagggaaaaaaaggagaaaaaacgatgcatcaagcttgtttgtcaaataccacagtattttattcattgttatcttgccaatggaaataaagtatgatattgcatttaaatattatatttatacctcatgtatatttttacctcaattgttgatatcaatcatcaattgtaaataaataattgccaaggcaaataaatttatatatattaaatatttcctattttctataaaataaaa

SEQ ID NO: 76 - DNA, 5929 bp, Homo sapiens
tttctttttaaaaatcgctgggtctgttgagctgtcctgggctgggtgccttgctctttgactgagactggagacagacggcaacagccacaggcagactgaggtggcaataggaaatctgccgagatgttcagtcaggtgcccaggaccccagcctcaggctgctactacctaaattccatgacacctgagggccaggagatgtacttgcgatttgatcagactacaagacgctctccttacaggatgagccggattctagcacgccatcagctagtgactaaaattcaacaagaaattgaggcaaaagaagcatgtgactggctccgtgctgccgggttcccgcaatacgctcagttatatgaggattcacaatttcccatcaacattgtggctgtcaagaatgatcatgattttcttgaaaaggaccttgtagaacctctttgcagacgactaaatacgttgaacaagtgtgcctcaatgaaacttgatgtgaacttccaaaggaaaaagggtgacgactccgatgaggaagatctttgtatcagcaacaaatggactttccaaagaaccagtcgcaggtggtctcgtgtggacgacctctacacgctgctccctcgaggagacagaaatgggtcaccgggaggcacggggatgaggaacacgaccagcagtgagagcgtcctcacagacctgagcgagcctgaggtctgctccattcacagcgaaagcagtggaggcagcgacagtcgcagccagccgggccagtgctgtacagacaacccggtcatgctggatgccccactcgtcagcagcagcctcccacagccccccagagatgtcctcaaccaccccttccaccccaagaatgagaagcccacgagggctagggccaaatcatttttgaaacgcatggaaacactccgagggaagggagcccacgggaggcataaggggtctgggcggacaggtggcctggtgatcagtgggcccatgttgcagcaggagccagagtcctttaaggctatgcagtgcatccaaataccaaatggagatctccagaattcgccgccacctgcctgcagaaaagggctcccatgctctggcaagtcgagtggcgagagcagcccgtcggagcacagcagcagcggggtgagcacgccctgcctgaaggaacgcaagtgccacgaggccaacaagcgcgggggcatgtacttggaggacctagatgtgctggcggggacagcactgccggatgcaggggaccaaagccgtatgcatgaatttcactcccaagagaatttggtggtgcatattcccaaggatcacaaaccaggaacattccccaaggcactttctattgaaagcctctctcccacagatagtagcaatggggttaattggaggaccggtagcatctccctgggcagagagcaggtccctggtgccagggagccccggctcatggcgtcctgccacagagccagccgagtcagtatctatgacaatgtccctggctcccatctgtatgccagcacaggagatcttttggacttggagaaagatgaccttttccctcacttggatgacattctgcagcatgtcaatgggctccaagaggtagtcgatgactggtccaaagatgtcttgcctgaactgcaaactcatgatacattggttggggaacctggcttatccacctttccatctcctaatcagatcaccttagattttgaaggtaactctgtctcagaaggtcggacgacacccagtgatgtggaaagagatgtaacatctcttaatgaatctgagcctcctggggtcagagacaggagggattctggtgtaggggcctctctgaccaggccaaacaggcgactccgatggaacagtttccagctgtcgcaccagccccggccggccccagcatcgccccacatcagcagccagacggccagccagctgagcctgctccagcgcttctcactgctccgcctcacggccatcatggagaagcactccatgtccaacaagcacggctggacatggtcagttccaaagttcatgaagaggatgaaagttcccgactacaaagacaaggctgtctttggcgttcctctcatagtccacgtccaaagaacgggacagcccctgcctcaaagtattcagcaagcactgagatatctacgcagcaactgcctcgatcaggtgggtctttttcgcaaatcaggagtgaagtctcgaatccatgcccttcgccaaatgaatgaaaacttccctgagaacgtcaactatgaagaccagtctgcttatgatgtggcggatatggtgaaacagttcttccgggacctccctgagcctcttttcaccaacaagctcagtgagacctttctccatatctatcagtatgtctccaaagagcagcggctgcaggccgtgcaggctgccatcctgctactggccgatgagaacagggaggtcctgcagacgctcttgtgtttcctgaacgacgtcgtcaacttggtggaagagaatcagatgacgcccatgaacctggcagtgtgtctggccccctccctctttcatcttaatttattgaagaaagaaagctctccacgagtcatacagaagaaatatgccactgggaagccagatcaaaaggacctcaacgagaatctggcagcagctcaggggctagcgcacatgatcatggaatgcgacagactttttgaggttccacacgagttggtggcccagtctcgtaactcgtatgtggaggctgagatccacgtgccaaccctggaagaattggggacacagctggaggagagtggggcaactttccacacttacctgaaccatctcatccagggcctccagaaagaagccaaggagaagttcaaaggatgggtcacgtgctccagcacggacaatacagatcttgctttcaaaaaggtgggcgacgggaacccgctgaagctgtggaaggcttctgtggaggtggaagcacccccctcagtggtcctgaaccgcgtgctgagagagcgccacctgtgggacgaggactttgtgcagtggaaggttgtggaaactctagacaggcaaacagagatctaccagtatgtgctgaacagcatggctccccatccttccagagactttgtggttctcaggacctggaaaactgatttgcccaaaggaatgtgtaccctggtgtccctctccgtggagcatgaggaagcccagctcctgggtggtgtgcgagcagtggtgatggactcgcagtacttgatagaaccgtgtggctctggcaagtcaagactgactcacatctgcaggatagacctgaaaggtcactccccagaatggtacagcaaaggctttggacatctgtgtgcagcagaagttgccaggattagaaactctttccagcccctcattgctgagggcccagaaactaaaatctgagttttgcccagtgtgacatcaaactcagggaagaggaagctaaagtgacgagtgtggcagagagtgtgcatgtgagaaagcgagagaaagaggaactgaaggacgcggttaatgcctaaaaatggaaacgttaagaagttggaatgttggagatgcaagaatttccaagaactttcttagccttcctggagatggctacatccctactaatataattttaaaatgagaactttatatatattacttaaaattaaatggactattccttgtgcattgcctaatttgctatttaaaggcttctaagaagcgtatacctaactgtaaataaatgtatgtatagcatatgtacatatgtgtgtatatctccatctttactgtatatatgtaaaataccaattttatatagaattgtgtgttttgaaaatgacggtgtctgactcagtgagtcccttcctcacacagttctttccaagtggctctgggccccatctctccactgtcctgtaagctgtgcagaacctgctgctaacaccaaggtgtgaacatgccctgatgcctaaccaaagatgagttaaccaaaggaaaataacattaaaggagacttatgtgttaacgctttgtttctgctattcaaaaactgagagtggagatctgggataaagcaaggaaataataattactcctccttaaagcaaatgggggggtgagaagtcattaccaaatttaaagctagatgaggagttgccactgggcccagtaagatggaatttcagtgagatatggaccaccggagtcagcgagagtgactgaaacagaagcgatacctctcgctcccatgcccatcactacagaccccaagtcaagatgaatatcatagcctttacttcttcacagccaaagggagcccctgtgttgtctcaagtttttataaatacatttcataatgttattaaatgtcattctatttgaccagtggcctatttggtcacagttaattggtgttttcttattgcactgaattcaactccagacaccatacaaagggagatgatggccattccgttcaaatcctagatcgttacagcttcagggaattcatattttgttatgtgtaggatactcttaaaatgtaattcattaaacttttacaatctgaaagacagggtttttaactaacatgagaccaaaactatgttctttgattagttttagatagtataatcgggtttattaattcttctgtgtttcttcactagccagtccaagctacctatgcatttgacccaaccttatttattattgtacagatgaagcgaattgactccctttagccaactgctaatggatcgaatgtgctttttattgtaattcaacagctatagagagaaagataacttattgtgtgtttgatttcagggagagagattttctttggtcatccataatagagattgataagatttagcaactggtgttggagaaaaaaagaaaagcaaatgagtgttttcaggtttttttgcattatatgcatttatgtaatgtttctgttatcagcaatgtgcaattattttattgagaggaataaaaaagctttctatgagtttggtatggtgcgaggaaaatcttacagtttgaattatgacctagaaatttttcattcccatatctacctaagaaggaagcagtaaatccataatttaccttttgggcaatgctttgtgagcaaaacaaagtcacttctgccataacatcttgaatttaaccatatatgccagattactttatatgcatcaacaagatcaccagtgaagtttaatctagctaaacactggtcctgctcctgagatgggatcctatgtgtttggaaaacgtgataggcacacgaggatgagtggctttgtatcgcccagagaggtgcttgtccagatttcacatgcacatgaattgcctggggatcttgtgaaactgcagactctgctccaagtaatctgggctgggcctgagattctgcatttctaaggagtctcagggatgcctatgctgctggcctaaaaccacactcagaaacgaggacctagaagatccctaaaacagaataagaacaaatgtgattgtatttctgattctccctctcttcgaattatctgacttttttgtttttgtgcacatagtaatcatatcaccgctgcataacaacacagtgcatctttttaaaacaaggaaaagggaaaaaaaggagaaaaaacgatgcatcaagcttgtttgtcaaataccacagtattttattcattgttatcttgccaatggaaataaagtatgatattgcatttaaatattatatttatacctcatgtatatttttacctcaattgttgatatcaatcatcaattgtaaataaataattgccaaggcaaataaatttatatatattaaatatttcctattttctataaaataaaa

SEQ ID NO: 77 - DNA, 5866 bp, Homo sapiens
aaaccaggcacaccattgatcaggctagaatgatgtggaccagtctcacagacaacagccaagcacagaggaaatattagctggcagagataacgaagagaaaacactcggtgacagatgcaccatctgtcagtttctgaggagcagttttcaagaaagctgaaaatgaattgaagaagagaggggttttgtttgaaaggtacagcacagcctaaggacaattttaaacaaaaaattgaggcaaaagaagcatgtgactggctccgtgctgccgggttcccgcaatacgctcagttatatgaggattcacaatttcccatcaacattgtggctgtcaagaatgatcatgattttcttgaaaaggaccttgtagaacctctttgcagacgactaaatacgttgaacaagtgtgcctcaatgaaacttgatgtgaacttccaaaggaaaaagggtgacgactccgatgaggaagatctttgtatcagcaacaaatggactttccaaagaaccagtcgcaggtggtctcgtgtggacgacctctacacgctgctccctcgaggagacagaaatgggtcaccgggaggcacggggatgaggaacacgaccagcagtgagagcgtcctcacagacctgagcgagcctgaggtctgctccattcacagcgaaagcagtggaggcagcgacagtcgcagccagccgggccagtgctgtacagacaacccggtcatgctggatgccccactcgtcagcagcagcctcccacagccccccagagatgtcctcaaccaccccttccaccccaagaatgagaagcccacgagggctagggccaaatcatttttgaaacgcatggaaacactccgagggaagggagcccacgggaggcataaggggtctgggcggacaggtggcctggtgatcagtgggcccatgttgcagcaggagccagagtcctttaaggctatgcagtgcatccaaataccaaatggagatctccagaattcgccgccacctgcctgcagaaaagggctcccatgctctggcaagtcgagtggcgagagcagcccgtcggagcacagcagcagcggggtgagcacgccctgcctgaaggaacgcaagtgccacgaggccaacaagcgcgggggcatgtacttggaggacctagatgtgctggcggggacagcactgccggatgcaggggaccaaagccgtatgcatgaatttcactcccaagagaatttggtggtgcatattcccaaggatcacaaaccaggaacattccccaaggcactttctattgaaagcctctctcccacagatagtagcaatggggttaattggaggaccggtagcatctccctgggcagagagcaggtccctggtgccagggagccccggctcatggcgtcctgccacagagccagccgagtcagtatctatgacaatgtccctggctcccatctgtatgccagcacaggagatcttttggacttggagaaagatgaccttttccctcacttggatgacattctgcagcatgtcaatgggctccaagaggtagtcgatgactggtccaaagatgtcttgcctgaactgcaaactcatgatacattggttggggaacctggcttatccacctttccatctcctaatcagatcaccttagattttgaaggtaactctgtctcagaaggtcggacgacacccagtgatgtggaaagagatgtaacatctcttaatgaatctgagcctcctggggtcagagacaggagggattctggtgtaggggcctctctgaccaggccaaacaggcgactccgatggaacagtttccagctgtcgcaccagccccggccggccccagcatcgccccacatcagcagccagacggccagccagctgagcctgctccagcgcttctcactgctccgcctcacggccatcatggagaagcactccatgtccaacaagcacggctggacatggtcagttccaaagttcatgaagaggatgaaagttcccgactacaaagacaaggctgtctttggcgttcctctcatagtccacgtccaaagaacgggacagcccctgcctcaaagtattcagcaagcactgagatatctacgcagcaactgcctcgatcaggtgggtctttttcgcaaatcaggagtgaagtctcgaatccatgcccttcgccaaatgaatgaaaacttccctgagaacgtcaactatgaagaccagtctgcttatgatgtggcggatatggtgaaacagttcttccgggacctccctgagcctcttttcaccaacaagctcagtgagacctttctccatatctatcagtatgtctccaaagagcagcggctgcaggccgtgcaggctgccatcctgctactggccgatgagaacagggaggtcctgcagacgctcttgtgtttcctgaacgacgtcgtcaacttggtggaagagaatcagatgacgcccatgaacctggcagtgtgtctggccccctccctctttcatcttaatttattgaagaaagaaagctctccacgagtcatacagaagaaatatgccactgggaagccagatcaaaaggacctcaacgagaatctggcagcagctcaggggctagcgcacatgatcatggaatgcgacagactttttgaggttccacacgagttggtggcccagtctcgtaactcgtatgtggaggctgagatccacgtgccaaccctggaagaattggggacacagctggaggagagtggggcaactttccacacttacctgaaccatctcatccagggcctccagaaagaagccaaggagaagttcaaaggatgggtcacgtgctccagcacggacaatacagatcttgctttcaaaaaggtgggcgacgggaacccgctgaagctgtggaaggcttctgtggaggtggaagcacccccctcagtggtcctgaaccgcgtgctgagagagcgccacctgtgggacgaggactttgtgcagtggaaggttgtggaaactctagacaggcaaacagagatctaccagtatgtgctgaacagcatggctccccatccttccagagactttgtggttctcaggacctggaaaactgatttgcccaaaggaatgtgtaccctggtgtccctctccgtggagcatgaggaagcccagctcctgggtggtgtgcgagcagtggtgatggactcgcagtacttgatagaaccgtgtggctctggcaagtcaagactgactcacatctgcaggatagacctgaaaggtcactccccagaatggtacagcaaaggctttggacatctgtgtgcagcagaagttgccaggattagaaactctttccagcccctcattgctgagggcccagaaactaaaatctgagttttgcccagtgtgacatcaaactcagggaagaggaagctaaagtgacgagtgtggcagagagtgtgcatgtgagaaagcgagagaaagaggaactgaaggacgcggttaatgcctaaaaatggaaacgttaagaagttggaatgttggagatgcaagaatttccaagaactttcttagccttcctggagatggctacatccctactaatataattttaaaatgagaactttatatatattacttaaaattaaatggactattccttgtgcattgcctaatttgctatttaaaggcttctaagaagcgtatacctaactgtaaataaatgtatgtatagcatatgtacatatgtgtgtatatctccatctttactgtatatatgtaaaataccaattttatatagaattgtgtgttttgaaaatgacggtgtctgactcagtgagtcccttcctcacacagttctttccaagtggctctgggccccatctctccactgtcctgtaagctgtgcagaacctgctgctaacaccaaggtgtgaacatgccctgatgcctaaccaaagatgagttaaccaaaggaaaataacattaaaggagacttatgtgttaacgctttgtttctgctattcaaaaactgagagtggagatctgggataaagcaaggaaataataattactcctccttaaagcaaatgggggggtgagaagtcattaccaaatttaaagctagatgaggagttgccactgggcccagtaagatggaatttcagtgagatatggaccaccggagtcagcgagagtgactgaaacagaagcgatacctctcgctcccatgcccatcactacagaccccaagtcaagatgaatatcatagcctttacttcttcacagccaaagggagcccctgtgttgtctcaagtttttataaatacatttcataatgttattaaatgtcattctatttgaccagtggcctatttggtcacagttaattggtgttttcttattgcactgaattcaactccagacaccatacaaagggagatgatggccattccgttcaaatcctagatcgttacagcttcagggaattcatattttgttatgtgtaggatactcttaaaatgtaattcattaaacttttacaatctgaaagacagggtttttaactaacatgagaccaaaactatgttctttgattagttttagatagtataatcgggtttattaattcttctgtgtttcttcactagccagtccaagctacctatgcatttgacccaaccttatttattattgtacagatgaagcgaattgactccctttagccaactgctaatggatcgaatgtgctttttattgtaattcaacagctatagagagaaagataacttattgtgtgtttgatttcagggagagagattttctttggtcatccataatagagattgataagatttagcaactggtgttggagaaaaaaagaaaagcaaatgagtgttttcaggtttttttgcattatatgcatttatgtaatgtttctgttatcagcaatgtgcaattattttattgagaggaataaaaaagctttctatgagtttggtatggtgcgaggaaaatcttacagtttgaattatgacctagaaatttttcattcccatatctacctaagaaggaagcagtaaatccataatttaccttttgggcaatgctttgtgagcaaaacaaagtcacttctgccataacatcttgaatttaaccatatatgccagattactttatatgcatcaacaagatcaccagtgaagtttaatctagctaaacactggtcctgctcctgagatgggatcctatgtgtttggaaaacgtgataggcacacgaggatgagtggctttgtatcgcccagagaggtgcttgtccagatttcacatgcacatgaattgcctggggatcttgtgaaactgcagactctgctccaagtaatctgggctgggcctgagattctgcatttctaaggagtctcagggatgcctatgctgctggcctaaaaccacactcagaaacgaggacctagaagatccctaaaacagaataagaacaaatgtgattgtatttctgattctccctctcttcgaattatctgacttttttgtttttgtgcacatagtaatcatatcaccgctgcataacaacacagtgcatctttttaaaacaaggaaaagggaaaaaaaggagaaaaaacgatgcatcaagcttgtttgtcaaataccacagtattttattcattgttatcttgccaatggaaataaagtatgatattgcatttaaatattatatttatacctcatgtatatttttacctcaattgttgatatcaatcatcaattgtaaataaataattgccaaggcaaataaatttatatatattaaatatttcctattttctataaaataaaa

SEQ ID NO: 78 - DNA, 5836 bp, Homo sapiens
cggaaacatgagagaggactatcatctgctccttgctctgaatttctttgaacctccatgctggaaccctcctcagttctccatgcaaacgttaaccaggcccctttgtggtgcttggtgctgcgctggtgcagagaatgcaaagacactgtctgtggtgggaaacagaaaagcagagtgaaccacacattccagcgccgggaaattgaggcaaaagaagcatgtgactggctccgtgctgccgggttcccgcaatacgctcagttatatgaggattcacaatttcccatcaacattgtggctgtcaagaatgatcatgattttcttgaaaaggaccttgtagaacctctttgcagacgactaaatacgttgaacaagtgtgcctcaatgaaacttgatgtgaacttccaaaggaaaaagggtgacgactccgatgaggaagatctttgtatcagcaacaaatggactttccaaagaaccagtcgcaggtggtctcgtgtggacgacctctacacgctgctccctcgaggagacagaaatgggtcaccgggaggcacggggatgaggaacacgaccagcagtgagagcgtcctcacagacctgagcgagcctgaggtctgctccattcacagcgaaagcagtggaggcagcgacagtcgcagccagccgggccagtgctgtacagacaacccggtcatgctggatgccccactcgtcagcagcagcctcccacagccccccagagatgtcctcaaccaccccttccaccccaagaatgagaagcccacgagggctagggccaaatcatttttgaaacgcatggaaacactccgagggaagggagcccacgggaggcataaggggtctgggcggacaggtggcctggtgatcagtgggcccatgttgcagcaggagccagagtcctttaaggctatgcagtgcatccaaataccaaatggagatctccagaattcgccgccacctgcctgcagaaaagggctcccatgctctggcaagtcgagtggcgagagcagcccgtcggagcacagcagcagcggggtgagcacgccctgcctgaaggaacgcaagtgccacgaggccaacaagcgcgggggcatgtacttggaggacctagatgtgctggcggggacagcactgccggatgcaggggaccaaagccgtatgcatgaatttcactcccaagagaatttggtggtgcatattcccaaggatcacaaaccaggaacattccccaaggcactttctattgaaagcctctctcccacagatagtagcaatggggttaattggaggaccggtagcatctccctgggcagagagcaggtccctggtgccagggagccccggctcatggcgtcctgccacagagccagccgagtcagtatctatgacaatgtccctggctcccatctgtatgccagcacaggagatcttttggacttggagaaagatgaccttttccctcacttggatgacattctgcagcatgtcaatgggctccaagaggtagtcgatgactggtccaaagatgtcttgcctgaactgcaaactcatgatacattggttggggaacctggcttatccacctttccatctcctaatcagatcaccttagattttgaaggtaactctgtctcagaaggtcggacgacacccagtgatgtggaaagagatgtaacatctcttaatgaatctgagcctcctggggtcagagacaggagggattctggtgtaggggcctctctgaccaggccaaacaggcgactccgatggaacagtttccagctgtcgcaccagccccggccggccccagcatcgccccacatcagcagccagacggccagccagctgagcctgctccagcgcttctcactgctccgcctcacggccatcatggagaagcactccatgtccaacaagcacggctggacatggtcagttccaaagttcatgaagaggatgaaagttcccgactacaaagacaaggctgtctttggcgttcctctcatagtccacgtccaaagaacgggacagcccctgcctcaaagtattcagcaagcactgagatatctacgcagcaactgcctcgatcaggtgggtctttttcgcaaatcaggagtgaagtctcgaatccatgcccttcgccaaatgaatgaaaacttccctgagaacgtcaactatgaagaccagtctgcttatgatgtggcggatatggtgaaacagttcttccgggacctccctgagcctcttttcaccaacaagctcagtgagacctttctccatatctatcagtatgtctccaaagagcagcggctgcaggccgtgcaggctgccatcctgctactggccgatgagaacagggaggtcctgcagacgctcttgtgtttcctgaacgacgtcgtcaacttggtggaagagaatcagatgacgcccatgaacctggcagtgtgtctggccccctccctctttcatcttaatttattgaagaaagaaagctctccacgagtcatacagaagaaatatgccactgggaagccagatcaaaaggacctcaacgagaatctggcagcagctcaggggctagcgcacatgatcatggaatgcgacagactttttgaggttccacacgagttggtggcccagtctcgtaactcgtatgtggaggctgagatccacgtgccaaccctggaagaattggggacacagctggaggagagtggggcaactttccacacttacctgaaccatctcatccagggcctccagaaagaagccaaggagaagttcaaaggatgggtcacgtgctccagcacggacaatacagatcttgctttcaaaaaggtgggcgacgggaacccgctgaagctgtggaaggcttctgtggaggtggaagcacccccctcagtggtcctgaaccgcgtgctgagagagcgccacctgtgggacgaggactttgtgcagtggaaggttgtggaaactctagacaggcaaacagagatctaccagtatgtgctgaacagcatggctccccatccttccagagactttgtggttctcaggacctggaaaactgatttgcccaaaggaatgtgtaccctggtgtccctctccgtggagcatgaggaagcccagctcctgggtggtgtgcgagcagtggtgatggactcgcagtacttgatagaaccgtgtggctctggcaagtcaagactgactcacatctgcaggatagacctgaaaggtcactccccagaatggtacagcaaaggctttggacatctgtgtgcagcagaagttgccaggattagaaactctttccagcccctcattgctgagggcccagaaactaaaatctgagttttgcccagtgtgacatcaaactcagggaagaggaagctaaagtgacgagtgtggcagagagtgtgcatgtgagaaagcgagagaaagaggaactgaaggacgcggttaatgcctaaaaatggaaacgttaagaagttggaatgttggagatgcaagaatttccaagaactttcttagccttcctggagatggctacatccctactaatataattttaaaatgagaactttatatatattacttaaaattaaatggactattccttgtgcattgcctaatttgctatttaaaggcttctaagaagcgtatacctaactgtaaataaatgtatgtatagcatatgtacatatgtgtgtatatctccatctttactgtatatatgtaaaataccaattttatatagaattgtgtgttttgaaaatgacggtgtctgactcagtgagtcccttcctcacacagttctttccaagtggctctgggccccatctctccactgtcctgtaagctgtgcagaacctgctgctaacaccaaggtgtgaacatgccctgatgcctaaccaaagatgagttaaccaaaggaaaataacattaaaggagacttatgtgttaacgctttgtttctgctattcaaaaactgagagtggagatctgggataaagcaaggaaataataattactcctccttaaagcaaatgggggggtgagaagtcattaccaaatttaaagctagatgaggagttgccactgggcccagtaagatggaatttcagtgagatatggaccaccggagtcagcgagagtgactgaaacagaagcgatacctctcgctcccatgcccatcactacagaccccaagtcaagatgaatatcatagcctttacttcttcacagccaaagggagcccctgtgttgtctcaagtttttataaatacatttcataatgttattaaatgtcattctatttgaccagtggcctatttggtcacagttaattggtgttttcttattgcactgaattcaactccagacaccatacaaagggagatgatggccattccgttcaaatcctagatcgttacagcttcagggaattcatattttgttatgtgtaggatactcttaaaatgtaattcattaaacttttacaatctgaaagacagggtttttaactaacatgagaccaaaactatgttctttgattagttttagatagtataatcgggtttattaattcttctgtgtttcttcactagccagtccaagctacctatgcatttgacccaaccttatttattattgtacagatgaagcgaattgactccctttagccaactgctaatggatcgaatgtgctttttattgtaattcaacagctatagagagaaagataacttattgtgtgtttgatttcagggagagagattttctttggtcatccataatagagattgataagatttagcaactggtgttggagaaaaaaagaaaagcaaatgagtgttttcaggtttttttgcattatatgcatttatgtaatgtttctgttatcagcaatgtgcaattattttattgagaggaataaaaaagctttctatgagtttggtatggtgcgaggaaaatcttacagtttgaattatgacctagaaatttttcattcccatatctacctaagaaggaagcagtaaatccataatttaccttttgggcaatgctttgtgagcaaaacaaagtcacttctgccataacatcttgaatttaaccatatatgccagattactttatatgcatcaacaagatcaccagtgaagtttaatctagctaaacactggtcctgctcctgagatgggatcctatgtgtttggaaaacgtgataggcacacgaggatgagtggctttgtatcgcccagagaggtgcttgtccagatttcacatgcacatgaattgcctggggatcttgtgaaactgcagactctgctccaagtaatctgggctgggcctgagattctgcatttctaaggagtctcagggatgcctatgctgctggcctaaaaccacactcagaaacgaggacctagaagatccctaaaacagaataagaacaaatgtgattgtatttctgattctccctctcttcgaattatctgacttttttgtttttgtgcacatagtaatcatatcaccgctgcataacaacacagtgcatctttttaaaacaaggaaaagggaaaaaaaggagaaaaaacgatgcatcaagcttgtttgtcaaataccacagtattttattcattgttatcttgccaatggaaataaagtatgatattgcatttaaatattatatttatacctcatgtatatttttacctcaattgttgatatcaatcatcaattgtaaataaataattgccaaggcaaataaatttatatatattaaatatttcctattttctataaaataaaa

SEQ ID NO: 79 - DNA, 2877 bp, Homo sapiens
aaaccaggcacaccattgatcaggctagaatgatgtggaccagtctcacagacaacagccaagcacagaggaaatattagctggcagagataacgaagagaaaacactcggtgacagatgcaccatctgtcagtttctgaggagcagttttcaagaaagctgaaaatgaattgaagaagagaggggttttgtttgaaaggtacagcacagcctaaggacaattttaaacaaaaaattgaggcaaaagaagcatgtgactggctccgtgctgccgggttcccgcaatacgctcagttatatgaggattcacaatttcccatcaacattgtggctgtcaagaatgatcatgattttcttgaaaaggaccttgtagaacctctttgcagacgactaaatacgttgaacaagtgtgcctcaatgaaacttgatgtgaacttccaaaggaaaaagggtgacgactccgatgaggaagatctttgtatcagcaacaaatggactttccaaagaaccagtcgcaggtggtctcgtgtggacgacctctacacgctgctccctcgaggagacagaaatgggtcaccgggaggcacggggatgaggaacacgaccagcagtgagagcgtcctcacagacctgagcgagcctgaggtctgctccattcacagcgaaagcagtggaggcagcgacagtcgcagccagccgggccagtgctgtacagacaacccggtcatgctggatgccccactcgtcagcagcagcctcccacagccccccagagatgtcctcaaccaccccttccaccccaagaatgagaagcccacgagggctagggccaaatcatttttgaaacgcatggaaacactccgagggaagggagcccacgggaggcataaggggtctgggcggacaggtggcctggtgatcagtgggcccatgttgcagcaggagccagagtcctttaaggctatgcagtgcatccaaataccaaatggagatctccagaattcgccgccacctgcctgcagaaaagggctcccatgctctggcaagtcgagtggcgagagcagcccgtcggagcacagcagcagcggggtgagcacgccctgcctgaaggaacgcaagtgccacgaggccaacaagcgcgggggcatgtacttggaggacctagatgtgctggcggggacagcactgccggatgcaggggaccaaagccgtatgcatgaatttcactcccaagagaatttggtggtgcatattcccaaggatcacaaaccaggaacattccccaaggcactttctattgaaagcctctctcccacagatagtagcaatggggttaattggaggaccggtagcatctccctgggcagagagcaggtccctggtgccagggagccccggctcatggcgtcctgccacagagccagccgagtcagtatctatgacaatgtccctggctcccatctgtatgccagcacaggagatcttttggacttggagaaagatgaccttttccctcacttggatgacattctgcagcatgtcaatgggctccaagaggtagtcgatgactggtccaaagatgtcttgcctgaactgcaaactcatgatacattggttggggaacctggcttatccacctttccatctcctaatcagatcaccttagattttgaaggtaactctgtctcagaaggtcggacgacacccagtgatgtggaaagagatgtaacatctcttaatgaatctgagcctcctggggtcagagacaggagggattctggtgtaggggcctctctgaccaggccaaacaggcgactccgatggaacagtttccagctgtcgcaccagccccggccggccccagcatcgccccacatcagcagccagacggccagccagctgagcctgctccagcgcttctcactgctccgcctcacggccatcatggagaagcactccatgtccaacaagcacggctggacatggtcagttccaaagttcatgaagaggatgaaagttcccgactacaaagacaaggctgtctttggcgttcctctcatagtccacgtccaaagaacgggacagcccctgcctcaaagtattcagcaagcactgagatatctacgcagcaactgcctcgatcaggtgggtctttttcgcaaatcaggagtgaagtctcgaatccatgcccttcgccaaatgaatgaaaacttccctgagaacgtcaactatgaagaccagtctgcttatgatgtggcggatatggtgaaacagttcttccgggacctccctgagcctcttttcaccaacaagctcagtgagacctttctccatatctatcagtgtaagtggaaataatgagattggtgttctcgtgggcatccttccactttaatgaaaataattccctatagattgagttttaattatacgaataatacatcaatccataaagatgtatgtaatcctgctctcctctacggaagtaacttttgctcaaagtttgatatggaaatccacaagccatttttttatgcatttgaaaatacctttttgacatcaaaatattccttctcaaaagagttttgtgtatgatctaaaacaaactttcaatacatttacaaaaatttaaaatgaaaaagggacacaatagaagttgttttatatataggtatttattaaaacttattcaattttttaaaaaagtaagcatttctttgggatataggaaattcaaagtgacatgaattaaaatgacaggaaataaaaacaaatgtattttagcacaaagtatcttcattggtgaaaagtaagcaaaccaaatcaagtcttaagcttaaataaacttatttatattttcaaaaaaaaaaaaaaaaa

SEQ ID NO: 80 - DNA, 2825 bp, Homo sapiens
cggaaacatgagagaggactatcatctgctccttgctctgaatttctttgaacctccatgctggaaccctcctcagttctccatgcaaacgttaaccaggcccctttgtggtgcttggtgctgcgctggtgcagagaatgcaaagacactgtctgtggtgggaaacagaaaagcagagtgaaccacacattccagcgccgggaaattgaggcaaaagaagcatgtgactggctccgtgctgccgggttcccgcaatacgctcagttatatgaggattcacaatttcccatcaacattgtggctgtcaagaatgatcatgattttcttgaaaaggaccttgtagaacctctttgcagacgactaaatacgttgaacaagtgtgcctcaatgaaacttgatgtgaacttccaaaggaaaaagggtgacgactccgatgaggaagatctttgtatcagcaacaaatggactttccaaagaaccagtcgcaggtggtctcgtgtggacgacctctacacgctgctccctcgaggagacagaaatgggtcaccgggaggcacggggatgaggaacacgaccagcagtgagagcgtcctcacagacctgagcgagcctgaggtctgctccattcacagcgaaagcagtggaggcagcgacagtcgcagccagccgggccagtgctgtacagacaacccggtcatgctggatgccccactcgtcagcagcagcctcccacagccccccagagatgtcctcaaccaccccttccaccccaagaatgagaagcccacgagggctagggccaaatcatttttgaaacgcatggaaacactccgagggaagggagcccacgggaggcataaggggtctgggcggacaggtggcctggtgatcagtgggcccatgttgcagcaggagccagagtcctttaaggctatgcagtgcatccaaataccaaatggagatctccagaattcgccgccacctgcctgcagaaaagggctcccatgctctggcaagtcgagtggcgagagcagcccgtcggagcacagcagcagcggggtgagcacgccctgcctgaaggaacgcaagtgccacgaggccaacaagcgcgggggcatgtacttggaggacctagatgtgctggcggggacagcactgccggatgcaggggaccaaagccgtatgcatgaatttcactcccaagagaatttggtggtgcatattcccaaggatcacaaaccaggaacattccccaaggcactttctattgaaagcctctctcccacagatagtagcaatggggttaattggaggaccggtagcatctccctgggcagagagcaggtccctggtgccagggagccccggctcatggcgtcctgccacagagccagccgagtcagtatctatgacaatgtccctggctcccatctgtatgccagcacaggagatcttttggacttggagaaagatgaccttttccctcacttggatgacattctgcagcatgtcaatgggctccaagaggtagtcgatgactggtccaaagatgtcttgcctgaactgcaaactcatgatacattggttggggaacctggcttatccacctttccatctcctaatcagatcaccttagattttgaaggtaactctgtctcagaaggtcggacgacacccagtgatgtggaaagagatgtaacatctcttaatgaatctgagcctcctggggtcagagacaggagggattctggtgtaggggcctctctgaccaggccaaacaggcgactccgatggaacagtttccagctgtcgcaccagccccggccggccccagcatcgccccacatcagcagccagacggccagccagctgagcctgctccagcgcttctcactgctccgcctcacggccatcatggagaagcactccatgtccaacaagcacggctggacatggtcagttccaaagttcatgaagaggatgaaagttcccgactacaaagacaaggctgtctttggcgttcctctcatagtccacgtccaaagaacgggacagcccctgcctcaaagtattcagcaagcactgagatatctacgcagcaactgcctcgatcaggagtgaagtctcgaatccatgcccttcgccaaatgaatgaaaacttccctgagaacgtcaactatgaagaccagtctgcttatgatgtggcggatatggtgaaacagttcttccgggacctccctgagcctcttttcaccaacaagctcagtgagacctttctccatatctatcagtgtaagtggaaataatgagattggtgttctcgtgggcatccttccactttaatgaaaataattccctatagattgagttttaattatacgaataatacatcaatccataaagatgtatgtaatcctgctctcctctacggaagtaacttttgctcaaagtttgatatggaaatccacaagccatttttttatgcatttgaaaatacctttttgacatcaaaatattccttctcaaaagagttttgtgtatgatctaaaacaaactttcaatacatttacaaaaatttaaaatgaaaaagggacacaatagaagttgttttatatataggtatttattaaaacttattcaattttttaaaaaagtaagcatttctttgggatataggaaattcaaagtgacatgaattaaaatgacaggaaataaaaacaaatgtattttagcacaaagtatcttcattggtgaaaagtaagcaaaccaaatcaagtcttaagcttaaataaacttatttatattttcaaaaaaaaaaaaaaaaa

SEQ ID NO: 81 - DNA, 6661 bp, Homo sapiens
gtttcccggcatgcgccgcggaggaagagacggagtcgacaataacaaaccaagccgcggcggtgtccgcggccctgccgagccctcggcgttgcctcagaatcccccagtcgcctgggcccctcggctctgacaggccgcggccttctgtcccccggccccagacccagagccgaggggcctgctcgcgtccttgtccgcccggacccctccctgcctcctagagttcggggccgcggcgggcgggcgcccgggacgccggcggttgtgtcggcttagcggtgccgaatgggcggttggtaaccgctgccgaggactaggcggcggcggaagatggtgccgggggtcgctggctctgctgctgccgccggcgaaggaggaggcgttgccggttttctgagtttaaccagtaatgccattcagttgccaatctcaagcaaagcaaacataagccagttttaatctactttttaagaaaagtggtagtccttttcacagtgcctgacgtaactgtatcagagggtgaggtataagctcacagaattcagataaatcatcatgaagttatatgtatttctggttaacactggaactactctaacatttgacactgaacttacagtgcaaactgtggcagaccttaagcatgccattcaaagcaaatacaagattgctattcaacaccaggtgctggtggtcaatggaggagaatgcatggctgcagatcgaagagtgtgtacctacagtgctgggacggatacaaatccaatttttctttttaacaaagaaatgatcttatgtgatcgtccacctgctattcctaaaactaccttttcgacagaaaatgacatggaaataaaagttgaagaatctcttatgatgcctgcagtttttcatactgttgcttcaaggacacagcttgcattggaaatgtatgaagttgccaagaaactttgttctttttgtgaaggtcttgtacatgatgaacatcttcaacaccaaggctgggctgcaatcatggccaacctggaggactgttcaaattcataccaaaagctacttttcaagtttgaaagtatttattcaaattatctgcagtccatagaagacatcaagttaaaacttactcatttaggaactgcagtttcagtaatggccaagattccactgttggagtgcctaaccagacatagttacagagaatgtttgggaagactggattctttacctgaacatgaagactcagaaaaagctgagatgaaaagatccactgaactggtgctctctcctgatatgcctagaacaactaacgaatctttgttaacctcatttcccaagtcagtggaacatgtgtccccagataccgcagatgctgaaagtggcaaagaaattagggaatcttgtcaaagtactgttcatcagcaagatgaaactacgattgacactaaagatggtgatctgcccttttttaatgtctctttgttagactggataaatgttcaagatagacctaatgatgtggaatctttggtcaggaagtgctttgattctatgagcaggcttgatccaaggattattcgaccatttatagcagaatgccgtcaaactattgccaaacttgataatcagaatatgaaagccattaaaggacttgaagatcggctctacgccctggaccagatgattgctagctgtggccgactggtgaatgaacagaaagagcttgctcagggatttttagctaatcagaagagagctgaaaacttaaaggatgcatctgtattacctgatttatgcctgagtcacgcaaatcagttgatgattatgttgcaaaatcatagaaaactgttagatattaagcagaagtgtaccactgccaaacaagaactagcaaataacctacatgtcagactgaagtggtgttgctttgtaatgcttcatgctgatcaagatggagagaagttacaagctttgctccgcctcgtaatagagctgttagaaagagtcaaaattgttgaagctcttagtacagttcctcagatgtactgcttagctgttgttgaggttgtaagaagaaaaatgttcataaaacactacagggagtgggctggtgctttagtcaaagatggaaagagattatatgaagcagaaaaatcaaaaagggaatcctttgggaaattatttaggaagtcttttttaagaaatcgtctgtttaggggactggactcctggcccccttccttttgtactcaaaagcctcgaaagtttgactgtgaacttccagatatttcattaaaagatttacagtttctgcaatcattttgtccttcggaagttcagccattcctcagggttcccttactttgtgactttgaacctctacaccagcatgtacttgctctacataatttggtaaaagcagcacaaagtttggatgaaatgtcacagaccattacagatctactgagtgaacaaaaggcatctgtgagtcagacatccccacagtctgcttcttcaccaaggatggaaagtacagcaggaattacaactactacctcaccgagaactcctccaccactgactgttcaggatcccttatgtcctgcagtttgtcccttagaagaattatctccagatagtattgatgcacatacgtttgattttgaaactattccccatccaaacatagaacagactattcaccaagtttctttagacttggattcattagcagaaagtcctgaatcagattttatgtctgctgtgaatgagtttgtaatagaagaaaatttgtcgtctcctaatcctataagtgatccacaaagcccagaaatgatggtggaatcactttattcatcagttatcaatgcgatagacagtagacgaatgcaggatacaaatgtatgtggtaaggaggattttggagatcatacttctctgaatgtccagttggaaagatgtagagttgttgcccaagactctcacttcagtatacaaaccattaaggaagacctttgccactttagaacatttgtacaaaaagaacagtgtgacttctcaaattcattaaaatgtacagcagtagaaataagaaacattattgaaaaagtaaaatgttctctggaaataacactaaaagaaaaacatcaaaaagaactactgtctttaaaaaatgaatatgaaggtaaacttgacggactaataaaggaaactgaagagaatgaaaacaaaattaaaaaattgaagggagagttagtatgccttgaggaggttttacaaaataaagataatgaatttgctttggttaaacatgaaaaagaagctgtaatctgcctgcagaatgaaaaggatcagaagttgttagagatggaaaatataatgcactctcaaaattgtgaaattaaagaactgaagcagtcacgagaaatagtgttagaagacttaaaaaagctccatgttgaaaatgatgagaagttacagttattgagggcagaacttcagtccttggagcaaagtcatctaaaggaattagaggacacacttcaggttaggcacatacaagagtttgagaaggttatgacagaccacagagtttctttggaggaattaaaaaaggaaaaccaacaaataattaatcaaatacaagaatctcatgctgaaattatccaggaaaaagaaaaacagttacaggaattaaaactcaaggtttctgatttgtcagacacgagatgcaagttagaggttgaacttgcgttgaaggaagcagaaactgatgaaataaaaattttgctggaagaaagcagagcccagcagaaggagaccttgaaatctcttcttgaacaagagacagaaaatttgagaacagaaattagtaaactcaaccaaaagattcaggataataatgaaaattatcaggtgggcttagcagagctaagaactttaatgacaattgaaaaagatcagtgtatttccgagttaattagtagacatgaagaagaatctaatatacttaaagctgaattaaacaaagtaacatctttgcataaccaagcatttgaaatagaaaaaaacctaaaagaacaaataattgaactgcagagtaaattggattcagaattgagtgctcttgaaagacaaaaagatgaaaaaattacccaacaagaagagaaatacgaagctattatccagaaccttgagaaagacagacaaaaattggtcagcagccaggagcaagacagagaacagttaattcagaagcttaattgtgaaaaagatgaagctattcagactgccctaaaagaatttaaattggagagagaagttgttgagaaagagttattagaaaaagttaaacatcttgagaatcaaatagcaaaaagtcctgccattgactctaccagaggagattcttcaagcttagttgctgaacttcaagaaaagcttcaggaagaaaaagctaagtttctagaacaacttgaagagcaagaaaaaagaaagaatgaagaaatgcaaaatgttcgaacatctttgattgcggaacaacagaccaattttaacactgttttaacaagagagaaaatgagaaaagaaaacataataaatgatcttagtgataagttgaaaagtacaatgcagcaacaagaacgggataaagatttgatagagtcactttctgaagatcgagctcgtttgcttgaggaaaagaaaaagcttgaagaagaagtcagtaagttgcgtagtagcagttttgttccttcaccatatgtagctacagccccagaactttatggagcttgtgcacctgaactcccaggtgaatcagatagatccgctgtggaaacagcagatgaaggaagagtggattcagcaatggagacaagcatgatgtctgtacaagaaaatattcatatgttgtctgaagaaaaacagcggataatgctgttagaacgaacattgcaattgaaagaagaagaaaataaacggttaaatcaaagactgatgtctcagagcatgtcttcagtatcttcaaggcattctgaaaagatagctattagagattttcaggtgggagatttggtactcatcatcctagacgaacgccatgacaattatgtgttatttactgttagtcctactttatattttctacattcagagtctctacctgccctggatctcaaaccagcttcaggtgcatctagaagaccctgggtacttggaaaagtaatggaaaaagaatactgtcaagccaaaaaggcacaaaacagatttaaagttcctttggggacaaagttttacagagtgaaagccgtatcatggaataagaaagtataacttatggacaaaattaatacattctatgacatttttttctgatttgtcctgcagtgctcattcatcactccaaaaacagcaggccatctttttatgcaaaagtcagcgtgacaatatacttcactggtgtacatcgtttactttttaactggcttcattttaggaataataaattcatcagaatccttggctgaattaaaatggtttttgttttttggtttttttttttacccagacaactctagaaatgcggaccaaactacttcattttctcaaagggcataccttgtgcattgtggcttatgatgagccatattaattgcctgttaaatatacactagcttgaacttagatgttaaatgttattattaccagcatttgtccttttgtgaaatcagtatcagaatacttgcactctttaacacattctttataaaatgtataaattattcagaactatttaaaataaagaggagtgttattgcatgctgataatcattttgagtttgcctcagtagatactaaagcaaattgtttcagtttttttaaatgccctttgatgtttcaaaaaaaaaaaggaactgtaatttgattgactgattttaagatcagccataagtaatcagcaatcttcaaaagcactttcagtggattggtcatctgggttctaaagggaagagtctgtgctactaaccatttcaaatgcagactcaaaccttcccaacatctttatgactctagaataatcatattgatgaaatcgtaattcatggttgagtttcagaacaaaagatattcattgcacattaaccatttagaggtcatttaaataacaaaatattgtattgtaaaagaactgtacaattttaaaacaataaagatttgaacctgtaaatgtgtgtgccttttaaagaaggatacatttttaatatatttgagtgattgctgggaagtgtgaaaatattgttatgtatcatatcaaagagaaacatgtttattacaaaaatgttctttaactatatactatgtaacagggtaaacagtgttatgtagaatagaattgtgtaaactagatctttagagaagttgccattgagcaaagttatttaaatgagttagttgagttggatgagaattgtttgaggtttgttgctagagaacaataataaaataattctttttcagaaaatatttaatttcttcataaaaataagttaaatatttttttaaatatgtatatctaatagtacaaaatggaataaacatcatagtgtatagaaaactgaatttgacaagttaatgaataaatgaacaaatgatttcaaaa

SEQ ID NO: 82 - DNA, 6670 bp, Homo sapiens
gtttcccggcatgcgccgcggaggaagagacggagtcgacaataacaaaccaagccgcggcggtgtccgcggccctgccgagccctcggcgttgcctcagaatcccccagtcgcctgggcccctcggctctgacaggccgcggccttctgtcccccggccccagacccagagccgaggggcctgctcgcgtccttgtccgcccggacccctccctgcctcctagagttcggggccgcggcgggcgggcgcccgggacgccggcggttgtgtcggcttagcggtgccgaatgggcggttggtaaccgctgccgaggactaggcggcggcggaagatggtgccgggggtcgctggctctgctgctgccgccggcgaaggaggaggcgttgccggttttctgagtttaaccagtaatgccattcagttgccaatctcaagcaaagcaaacataagccagttttaatctactttttaagaaaagtggtagtccttttcacagtgcctgacgtaactgtatcagagggtgaggtataagctcacagaattcagataaatcatcatgaagttatatgtatttctggttaacactggaactactctaacatttgacactgaacttacagtgcaaactgtggcagaccttaagcatgccattcaaagcaaatacaagattgctattcaacaccaggtgctggtggtcaatggaggagaatgcatggctgcagatcgaagagtgtgtacctacagtgctgggacggatacaaatccaatttttctttttaacaaagaaatgatcttatgtgatcgtccacctgctattcctaaaactaccttttcgacagaaaatgacatggaaataaaagttgaagaatctcttatgatgcctgcagtttttcatactgttgcttcaaggacacagcttgcattggaaatgtatgaagttgccaagaaactttgttctttttgtgaaggtcttgtacatgatgaacatcttcaacaccaaggctgggctgcaatcatggccaacctggaggactgttcaaattcataccaaaagctacttttcaagtttgaaagtatttattcaaattatctgcagtccatagaagacatcaagttaaaacttactcatttaggaactgcagtttcagtaatggccaagattccactgttggagtgcctaaccagacatagttacagagaatgtttgggaagactggattctttacctgaacatgaagactcagaaaaagctgagatgaaaagatccactgaactggtgctctctcctgatatgcctagaacaactaacgaatctttgttaacctcatttcccaagtcagtggaacatgtgtccccagataccgcagatgctgaaagtggcaaagaaattagggaatcttgtcaaagtactgttcatcagcaagatgaaactacgattgacactaaagatggtgatctgcccttttttaatgtctctttgttagactggataaatgttcaagatagacctaatgatgtggaatctttggtcaggaagtgctttgattctatgagcaggcttgatccaaggattattcgaccatttatagcagaatgccgtcaaactattgccaaacttgataatcagaatatgaaagccattaaaggacttgaagatcggctctacgccctggaccagatgattgctagctgtggccgactggtgaatgaacagaaagagcttgctcagggatttttagctaatcagaagagagctgaaaacttaaaggatgcatctgtattacctgatttatgcctgagtcacgcaaatcagttgatgattatgttgcaaaatcatagaaaactgttagatattaagcagaagtgtaccactgccaaacaagaactagcaaataacctacatgtcagactgaagtggtgttgctttgtaatgcttcatgctgatcaagatggagagaagttacaagctttgctccgcctcgtaatagagctgttagaaagagtcaaaattgttgaagctcttagtacagttcctcagatgtactgcttagctgttgttgaggttgtaagaagaaaaatgttcataaaacactacagggagtgggctggtgctttagtcaaagatggaaagagattatatgaagcagaaaaatcaaaaagggaatcctttgggaaattatttaggaagtcttttttaagaaatcgtctgtttaggggactggactcctggcccccttccttttgtactcaaaagcctcgaaagtttgactgtgaacttccagatatttcattaaaagatttacagtttctgcaatcattttgtccttcggaagttcagccattcctcagggttcccttactttgtgactttgaacctctacaccagcatgtacttgctctacataatttggtaaaagcagcacaaagtttggatgaaatgtcacagaccattacagatctactgagtgaacaaaaggcatctgtgagtcagacatccccacagtctgcttcttcaccaaggatggaaagtacagcaggaattacaactactacctcaccgagaactcctccaccactgactgttcaggatcccttatgtcctgcagtttgtcccttagaagaattatctccagatagtattgatgcacatacgtttgattttgaaactattccccatccaaacatagaacagactattcaccaagtttctttagacttggattcattagcagaaagtcctgaatcagattttatgtctgctgtgaatgagtttgtaatagaagaaaatttgtcgtctcctaatcctataagtgatccacaaagcccagaaatgatggtggaatcactttattcatcagttatcaatgcgatagacagtagacgaatgcaggatacaaatgtatgtggtaaggaggattttggagatcatacttctctgaatgtccagttggaaagatgtagagttgttgcccaagactctcacttcagtatacaaaccattaaggaagacctttgccactttagaacatttgtacaaaaagaacagtgtgacttctcaaattcattaaaatgtacagcagtagaaataagaaacattattgaaaaagtaaaatgttctctggaaataacactaaaagaaaaacatcaaaaagaactactgtctttaaaaaatgaatatgaaggtaaacttgacggactaataaaggaaactgaagagaatgaaaacaaaattaaaaaattgaagggagagttagtatgccttgaggaggttttacaaaataaagataatgaatttgctttggttaaacatgaaaaagaagctgtaatctgcctgcagaatgaaaaggatcagaagttgttagagatggaaaatataatgcactctcaaaattgtgaaattaaagaactgaagcagtcacgagaaatagtgttagaagacttaaaaaagctccatgttgaaaatgatgagaagttacagttattgagggcagaacttcagtccttggagcaaagtcatctaaaggaattagaggacacacttcaggttaggcacatacaagagtttgagaaggttatgacagaccacagagtttctttggaggaattaaaaaaggaaaaccaacaaataattaatcaaatacaagaatctcatgctgaaattatccaggaaaaagaaaaacagttacaggaattaaaactcaaggtttctgatttgtcagacacgagatgcaagttagaggttgaacttgcgttgaaggaagcagaaactgatgaaataaaaattttgctggaagaaagcagagcccagcagaaggagaccttgaaatctcttcttgaacaagagacagaaaatttgagaacagaaattagtaaactcaaccaaaagattcaggataataatgaaaattatcaggtgggcttagcagagctaagaactttaatgacaattgaaaaagatcagtgtatttccgagttaattagtagacatgaagaagaatctaatatacttaaagctgaattaaacaaagtaacatctttgcataaccaagcatttgaaatagaaaaaaacctaaaagaacaaataattgaactgcagagtaaattggattcagaattgagtgctcttgaaagacaaaaagatgaaaaaattacccaacaagaagagaaatacgaagctattatccagaaccttgagaaagacagacaaaaattggtcagcagccaggagcaagacagagaacagttaattcagaagcttaattgtgaaaaagatgaagctattcagactgccctaaaagaatttaaattggagagagaagttgttgagaaagagttattagaaaaagttaaacatcttgagaatcaaatagcaaaaagtcctgccattgactctaccagaggagattcttcaagcttagttgctgaacttcaagaaaagcttcaggaagaaaaagctaagtttctagaacaacttgaagagcaagaaaaaagaaagaatgaagaaatgcaaaatgttcgaacatctttgattgcggaacaacagaccaattttaacactgttttaacaagagagaaaatgagaaaagaaaacataataaatgatcttagtgataagttgaaaagtacaatgcagcaacaagaacgggataaagatttgatagagtcactttctgaagatcgagctcgtttgcttgaggaaaagaaaaagcttgaagaagaagtcagtaagttgcgtagtagcagttttgttccttcaccatatgtagctacagccccagaactttatggagcttgtgcacctgaactcccaggtgaatcagatagatccgctgtggaaacagcagatgaaggaagagtggattcagcaatggagacaagcatgatgtctgtacaagaaaatattcatatgttgtctgaagaaaaacagcggataatgctgttagaacgaacattgcaattgaaagaagaagaaaataaacggttaaatcaaagactgatgtctcagagcatgtcttcagtatcttcaaggcattctgaaaagatagctattagagattttcaggtgggagatttggtactcatcatcctagacgaacgccatgacaattatgtgttatttactgttagtcctactttatattttctacattcagagtctctacctgccctggatctcaaaccaggtgagggtgcttcaggtgcatctagaagaccctgggtacttggaaaagtaatggaaaaagaatactgtcaagccaaaaaggcacaaaacagatttaaagttcctttggggacaaagttttacagagtgaaagccgtatcatggaataagaaagtataacttatggacaaaattaatacattctatgacatttttttctgatttgtcctgcagtgctcattcatcactccaaaaacagcaggccatctttttatgcaaaagtcagcgtgacaatatacttcactggtgtacatcgtttactttttaactggcttcattttaggaataataaattcatcagaatccttggctgaattaaaatggtttttgttttttggtttttttttttacccagacaactctagaaatgcggaccaaactacttcattttctcaaagggcataccttgtgcattgtggcttatgatgagccatattaattgcctgttaaatatacactagcttgaacttagatgttaaatgttattattaccagcatttgtccttttgtgaaatcagtatcagaatacttgcactctttaacacattctttataaaatgtataaattattcagaactatttaaaataaagaggagtgttattgcatgctgataatcattttgagtttgcctcagtagatactaaagcaaattgtttcagtttttttaaatgccctttgatgtttcaaaaaaaaaaaggaactgtaatttgattgactgattttaagatcagccataagtaatcagcaatcttcaaaagcactttcagtggattggtcatctgggttctaaagggaagagtctgtgctactaaccatttcaaatgcagactcaaaccttcccaacatctttatgactctagaataatcatattgatgaaatcgtaattcatggttgagtttcagaacaaaagatattcattgcacattaaccatttagaggtcatttaaataacaaaatattgtattgtaaaagaactgtacaattttaaaacaataaagatttgaacctgtaaatgtgtgtgccttttaaagaaggatacatttttaatatatttgagtgattgctgggaagtgtgaaaatattgttatgtatcatatcaaagagaaacatgtttattacaaaaatgttctttaactatatactatgtaacagggtaaacagtgttatgtagaatagaattgtgtaaactagatctttagagaagttgccattgagcaaagttatttaaatgagttagttgagttggatgagaattgtttgaggtttgttgctagagaacaataataaaataattctttttcagaaaatatttaatttcttcataaaaataagttaaatatttttttaaatatgtatatctaatagtacaaaatggaataaacatcatagtgtatagaaaactgaatttgacaagttaatgaataaatgaacaaatgatttcaaaa

SEQ ID NO: 83 - protein, 269 aa, Homo sapiens
MASEFKKKLFWRAVVAEFLATTLFVFISIGSALGFKYPVGNNQTAVQDNVKVSLAFGLSIATLAQSVGHISGAHLNPAVTLGLLLSCQISIFRALMYIIAQCVGAIVATAILSGITSSLTGNSLGRNDLADGVNSGQGLGIEIIGTLQLVLCVLATTDRRRRDLGGSAPLAIGLSVALGHLLAIDYTGCGINPARSFGSAVITHNFSNHWIFWVGPFIGGALAVLIYDFILAPRSSDLTDRVKVWTSGQVEEYDLDADDINSRVEMKPK

SEQ ID NO: 84 - protein, 186 aa, Homo sapiens
MPGARPLPLVLVPQNTLAWMQLDAKAPAHPRPLQLLGRVGPGSRQLADGVNSGQGLGIEIIGTLQLVLCVLATTDRRRRDLGGSAPLAIGLSVALGHLLAIDYTGCGINPARSFGSAVITHNFSNHWIFWVGPFIGGALAVLIYDFILAPRSSDLTDRVKVWTSGQVEEYDLDADDINSRVEMKPK

SEQ ID NO: 85 - protein, 218 aa, Homo sapiens
MFWTFGYEAVSPAGPSHLFASLLLGVLLTITFMPGARPLPLVLVPQNTLAWMQLDAKAPAHPRPLQLLGRVGPGSRQLADGVNSGQGLGIEIIGTLQLVLCVLATTDRRRRDLGGSAPLAIGLSVALGHLLAIDYTGCGINPARSFGSAVITHNFSNHWIFWVGPFIGGALAVLIYDFILAPRSSDLTDRVKVWTSGQVEEYDLDADDINSRVEMKPK

SEQ ID NO: 86 - protein, 154 aa, Homo sapiens
MQSGMGWNVLDFWLADGVNSGQGLGIEIIGTLQLVLCVLATTDRRRRDLGGSAPLAIGLSVALGHLLAIDYTGCGINPARSFGSAVITHNFSNHWIFWVGPFIGGALAVLIYDFILAPRSSDLTDRVKVWTSGQVEEYDLDADDINSRVEMKPK

SEQ ID NO: 87 - protein, 202 aa, Homo sapiens
MELWGAYLLLCLFSLLTQVTTEPPTQKPKKIVNAKKDVVNTKMFEELKSRLDTLAQEVALLKEQQALQTVCLKGTKVHMKCFLAFTQTKTFHEASEDCISRGGTLGTPQTGSENDALYEYLRQSVGNEAEIWLGLNDMAAEGTWVDMTGARIAYKNWETEITAQPDGGKTENCAVLSGAANGKWFDKRCRDQLPYICQFGIV

SEQ ID NO: 88 - protein, 514 aa, Homo sapiens
MADAEVIILPKKHKKKKERKSLPEEDVAEIQHAEEFLIKPESKVAKLDTSQWPLLLKNFDKLNVRTTHYTPLACGSNPLKREIGDYIRTGFINLDKPSNPSSHEVVAWIRRILRVEKTGHSGTLDPKVTGCLIVCIERATRLVKSQQSAGKEYVGIVRLHNAIEGGTQLSRALETLTGALFQRPPLIAAVKRQLRVRTIYESKMIEYDPERRLGIFWVSCEAGTYIRTLCVHLGLLLGVGGQMQELRRVRSGVMSEKDHMVTMHDVLDAQWLYDNHKDESYLRRVVYPLEKLLTSHKRLVMKDSAVNAICYGAKIMLPGVLRYEDGIEVNQEIVVITTKGEAICMAIALMTTAVISTCDHGIVAKIKRVIMERDTYPRKWGLGPKASQKKLMIKQGLLDKHGKPTDSTPATWKQEYVDYSESAKKEVVAEVVKAPQVVAEAAKTAKRKRESESESDETPPAAPQLIKKEKKKSKKDKKAKAGLESGAEPGDGDSDTTKKKKKKKKAKEVELVSE

SEQ ID NO: 89 - protein, 509 aa, Homo sapiens
MADAEVIILPKKHKKKKERKSLPEEDVAEIQHAEEFLIKPESKVAKLDTSQWPLLLKNFDKLNVRTTHYTPLACGSNPLKREIGDYIRTGFINLDKPSNPSSHEVVAWIRRILRVEKTGHSGTLDPKVTGCLIVCIERATRLVKSQQSAGKEYVGIVRLHNAIEGGTQLSRALETLTGALFQRPPLIAAVKRQLRVRTIYESKMIEYDPERRLGIFWVSCEAGTYIRTLCVHLGLLLGVGGQMQELRRVRSGVMSEKDHMVTMHDVLDAQWLYDNHKDESYLRRVVYPLEKLLTSHKRLVMKDSAVNAICYGAKIMLPGVLRYEDGIEVNQEIVVITTKGEAICMAIALMTTAVISTCDHGIVAKIKRVIMERDTYPRKWGLGPKASQKKLMIKQGLLDKHGKPTDSTPATWKQDESAKKEVVAEVVKAPQVVAEAAKTAKRKRESESESDETPPAAPQLIKKEKKKSKKDKKAKAGLESGAEPGDGDSDTTKKKKKKKKAKEVELVSE

SEQ ID NO: 90 - protein, 676 aa, Homo sapiens
MRVLGGRCGALLACLLLVLPVSEANFLSKQQASQVLVRKRRANSLLEETKQGNLERECIEELCNKEEAREVFENDPETDYFYPKYLVCLRSFQTGLFTAARQSTNAYPDLRSCVNAIPDQCSPLPCNEDGYMSCKDGKASFTCTCKPGWQGEKCEFDINECKDPSNINGGCSQICDNTPGSYHCSCKNGFVMLSNKKDCKDVDECSLKPSICGTAVCKNIPGDFECECPEGYRYNLKSKSCEDIDECSENMCAQLCVNYPGGYTCYCDGKKGFKLAQDQKSCEVVSVCLPLNLDTKYELLYLAEQFAGVVLYLKFRLPEISRFSAEFDFRTYDSEGVILYAESIDHSAWLLIALRGGKIEVQLKNEHTSKITTGGDVINNGLWNMVSVEELEHSISIKIAKEAVMDINKPGPLFKPENGLLETKVYFAGFPRKVESELIKPINPRLDGCIRSWNLMKQGASGIKEIIQEKQNKHCLVTVEKGSYYPGSGIAQFHIDYNNVSSAEGWHVNVTLNIRPSTGTGVMLALVSGNNTVPFAVSLVDSTSEKSQDILLSVENTVIYRIQALSLCSDQQSHLEFRVNRNNLELSTPLKIETISHEDLQRQLAVLDKAMKAKVATYLGGLPDVPFSATPVNAFYNGCMEVNINGVQLDLDEAISKHNDIRAHSCPSVWKKTKNS

SEQ ID NO: 91 - protein, 1437 aa, Homo sapiens
MDFSFSFMQGIMGNTIQQPPQLIDSANIRQEDAFDNNSDIAEDGGQTPYEATLQQGFQYPATTEDLPPLTNGYPSSISVYETQTKYQSYNQYPNGSANGFGAVRNFSPTDYYHSEIPNTRPHEILEKPSPPQPPPPPSVPQTVIPKKTGSPEIKLKITKTIQNGRELFESSLCGDLLNEVQASEHTKSKHESRKEKRKKSNKHDSSRSEERKSHKIPKLEPEEQNRPNERVDTVSEKPREEPVLKEEAPVQPILSSVPTTEVSTGVKFQVGDLVWSKVGTYPWWPCMVSSDPQLEVHTKINTRGAREYHVQFFSNQPERAWVHEKRVREYKGHKQYEELLAEATKQASNHSEKQKIRKPRPQRERAQWDIGIAHAEKALKMTREERIEQYTFIYIDKQPEEALSQAKKSVASKTEVKKTRRPRSVLNTQPEQTNAGEVASSLSSTEIRRHSQRRHTSAEEEEPPPVKIAWKTAAARKSLPASITMHKGSLDLQKCNMSPVVKIEQVFALQNATGDGKFIDQFVYSTKGIGNKTEISVRGQDRLIISTPNQRNEKPTQSVSSPEATSGSTGSVEKKQQRRSIRTRSESEKSTEVVPKKKIKKEQVETVPQATVKTGLQKGASEISDSCKPLKKRSRASTDVEMTSSAYRDTSDSDSRGLSDLQVGFGKQVDSPSATADADVSDVQSMDSSLSRRGTGMSKKDTVCQICESSGDSLIPCEGECCKHFHLECLGLASLPDSKFICMECKTGQHPCFSCKVSGKDVKRCSVGACGKFYHEACVRKFPTAIFESKGFRCPQHCCSACSMEKDIHKASKGRMMRCLRCPVAYHSGDACIAAGSMLVSSYILICSNHSKRSSNSSAVNVGFCFVCARGLIVQDHSDPMFSSYAYKSHYLLNESNRAELMKLPMIPSSSASKKKCEKGGRLLCCESCPASFHPECLSIEMPEGCWNCNDCKAGKKLHYKQIVWVKLGNYRWWPAEICNPRSVPLNIQGLKHDLGDFPVFFFGSHDYYWVHQGRVFPYVEGDKSFAEGQTSINKTFKKALEEAAKRFQELKAQRESKEALEIEKNSRKPPPYKHIKANKVIGKVQIQVADLSEIPRCNCKPADENPCGLESECLNRMLQYECHPQVCPAGDRCQNQCFTKRLYPDAEIIKTERRGWGLRTKRSIKKGEFVNEYVGELIDEEECRLRIKRAHENSVTNFYMLTVTKDRIIDAGPKGNYSRFMNHSCNPNCETQKWTVNGDVRVGLFALCDIPAGMELTFNYNLDCLGNGRTECHCGADNCSGFLGVRPKSACASTNEEKAKNAKLKQKRRKIKTEPKQMHEDYCFQCGDGGELVMCDKKDCPKAYHLLCLNLTQPPYGKWECPWHQCDECSSAAVSFCEFCPHSFCKDHEKGALVPSALEGRLCCSEHDPMAPVSPEYWSKIKCKWESQDHGEEVKE

SEQ ID NO: 92 - protein, 850 aa, Homo sapiens
MTSHYVIAIFALMSSCLATAGPEPGALCELSPVSASHPVQALMESFTVLSGCASRGTTGLPQEVHVLNLRTAGQGPGQLQREVTLHLNPISSVHIHHKSVVFLLNSPHPLVWHLKTERLATGVSRLFLVSEGSVVQFSSANFSLTAETEERNFPHGNEHLLNWARKEYGAVTSFTELKIARNIYIKVGEDQVFPPKCNIGKNFLSLNYLAEYLQPKAAEGCVMSSQPQNEEVHIIELITPNSNPYSAFQVDITIDIRPSQEDLEVVKNLILILKCKKSVNWVIKSFDVKGSLKIIAPNSIGFGKESERSMTMTKSIRDDIPSTQGNLVKWALDNGYSPITSYTMAPVANRFHLRLENNEEMGDEEVHTIPPELRILLDPGALPALQNPPIRGGEGQNGGLPFPFPDISRRVWNEEGEDGLPRPKDPVIPSIQLFPGLREPEEVQGSVDIALSVKCDNEKMIVAVEKDSFQASGYSGMDVTLLDPTCKAKMNGTHFVLESPLNGCGTRPRWSALDGVVYYNSIVIQVPALGDSSGWPDGYEDLESGDNGFPGDMDEGDASLFTRPEIVVFNCSLQQVRNPSSFQEQPHGNITFNMELYNTDLFLVPSQGVFSVPENGHVYVEVSVTKAEQELGFAIQTCFISPYSNPDRMSHYTIIENICPKDESVKFYSPKRVHFPIPQADMDKKRFSFVFKPVFNTSLLFLQCELTLCTKMEKHPQKLPKCVPPDEACTSLDASIIWAMMQNKKTFTKPLAVIHHEAESKEKGPSMKEPNPISPPIFHGLDTLTVMGIAFAAFVIGALLTGALWYIYSHTGETAGRQQVPTSPPASENSSAAHSIGSTQSTPCSSSSTA

SEQ ID NO: 93 - protein, 850 aa, Homo sapiens; identical to SEQ ID NO: 92

SEQ ID NO: 94 - protein, 851 aa, Homo sapiens
MTSHYVIAIFALMSSCLATAGPEPGALCELSPVSASHPVQALMESFTVLSGCASRGTTGLPQEVHVLNLRTAGQGPGQLQREVTLHLNPISSVHIHHKSVVFLLNSPHPLVWHLKTERLATGVSRLFLVSEGSVVQFSSANFSLTAETEERNFPHGNEHLLNWARKEYGAVTSFTELKIARNIYIKVGEDQVFPPKCNIGKNFLSLNYLAEYLQPKAAEGCVMSSQPQNEEVHIIELITPNSNPYSAFQVDITIDIRPSQEDLEVVKNLILILKCKKSVNWVIKSFDVKGSLKIIAPNSIGFGKESERSMTMTKSIRDDIPSTQGNLVKWALDNGYSPITSYTMAPVANRFHLRLENNAEEMGDEEVHTIPPELRILLDPGALPALQNPPIRGGEGQNGGLPFPFPDISRRVWNEEGEDGLPRPKDPVIPSIQLFPGLREPEEVQGSVDIALSVKCDNEKMIVAVEKDSFQASGYSGMDVTLLDPTCKAKMNGTHFVLESPLNGCGTRPRWSALDGVVYYNSIVIQVPALGDSSGWPDGYEDLESGDNGFPGDMDEGDASLFTRPEIVVFNCSLQQVRNPSSFQEQPHGNITFNMELYNTDLFLVPSQGVFSVPENGHVYVEVSVTKAEQELGFAIQTCFISPYSNPDRMSHYTIIENICPKDESVKFYSPKRVHFPIPQADMDKKRFSFVFKPVFNTSLLFLQCELTLCTKMEKHPQKLPKCVPPDEACTSLDASIIWAMMQNKKTFTKPLAVIHHEAESKEKGPSMKEPNPISPPIFHGLDTLTVMGIAFAAFVIGALLTGALWYIYSHTGETAGRQQVPTSPPASENSSAAHSIGSTQSTPCSSSSTA

SEQ ID NO: 95 - protein, 373 aa, Homo sapiens
MASKPEKRVASSVFITLAPPRRDVAVAEEVRQAVCEARRGRPWEAPAPMKTPEAGLAGRPSPWTTPGRAAATVPAAPMQLFNGGCPPPPPVLDGEDVLPDLDLLPPPPPPPPVLLPSEEEAPAPMGASLIADLEQLHLSPPPPPPQAPAEGPSVQPGPLRPMEEELPPPPAEPVEKGASTDICAFCHKTVSPRELAVEAMKRQYHAQCFTCRTCRRQLAGQSFYQKDGRPLCEPCYQDTLERCGKCGEVVRDHIIRALGQAFHPSCFTCVTCARCIGDESFALGSQNEVYCLDDFYRKFAPVCSICENPIIPRDGKDAFKIECMGRNFHENCYRCEDCRILLSVEPTDQGCYPLNNHLFCKPCHVKRSAAGCC

SEQ ID NO: 96 - protein, 374 aa, Homo sapiens
MASKPEKRVASSVFITLAPPRRDVAVAEEVRQAVCEARRGRPWEAPAPMKTPEAGLAGRPSPWTTPGRAAATVPAAPMQLFNGGCPPPPPVLDGEDVLPDLDLLPPPPPPPPVLLPSEEEAPAPMGASLIADLEQLHLSPPPPPPQAPAEGPSVQPGPLRPMEEELPPPPAEPVEKGASTDICAFCHKTVSPRELAVEAMKRQYHAQCFTCRTCRRQLAGQSFYQKDGRPLCEPCYQDTLERCGKCGEVVRDHIIRALGQAFHPSCFTCVTCARCIGDESFALGSQNEVYCLDDFYRYEKGLCTGWGAGTGRDPSRVKELSLSPGCWARVSCLLVYYKEYYRAGLGAVAHACNPSTLGGRGGWITRSGDRDHPG

SEQ ID NO: 97 - protein, 276 aa, Homo sapiens
MASKPEKRVASSVFITLAPPRRDVAVAEEVRQAVCEARRGRPWEAPAPMKTPEAGLAGRPSPWTTPGRAAATVPAAPMQLFNGDICAFCHKTVSPRELAVEAMKRQYHAQCFTCRTCRRQLAGQSFYQKDGRPLCEPCYQDTLERCGKCGEVVRDHIIRALGQAFHPSCFTCVTCARCIGDESFALGSQNEVYCLDDFYRKFAPVCSICENPIIPRDGKDAFKIECMGRNFHENCYRCEDCRILLSVEPTDQGCYPLNNHLFCKPCHVKRSAAGCC

SEQ ID NO: 98 - protein, 476 aa, Homo sapiens
MSGARCRTLYPFSGERHGQGLRFAAGELITLLQVPDGGWWEGEKEDGLRGWFPASYVQLLEKPGMVPPPPGEESQTVILPPGWQSYLSPQGRRYYVNTTTNETTWERPSSSPGIPASPGSHRSSLPPTVNGYHASGTPAHPPETAHMSVRKSTGDSQNLGSSSPSKKQSKENTITINCVTFPHPDTMPEQQLLKPTEWSYCDYFWADKKDPQGNGTVAGFELLLQKQLKGKQMQKEMSEFIRERIKIEEDYAKNLAKLSQNSLASQEEGSLGEAWAQVKKSLADEAEVHLKFSAKLHSEVEKPLMNFRENFKKDMKKCDHHIADLRKQLASRYASVEKARKALTERQRDLEMKTQQLEIKLSNKTEEDIKKARRKSTQAGDDLMRCVDLYNQAQSKWFEEMVTTTLELERLEVERVEMIRQHLCQYTQLRHETDMFNQSTVEPVDQLLRKVDPAKDRELWVREHKTGNIRPVDMEI

SEQ ID NO: 99 - protein, 416 aa, Homo sapiens
MKPGMVPPPPGEESQTVILPPGWQSYLSPQGRRYYVNTTTNETTWERPSSSPGIPASPGSHRSSLPPTVNGYHASGTPAHPPETAHMSVRKSTGDSQNLGSSSPSKKQSKENTITINCVTFPHPDTMPEQQLLKPTEWSYCDYFWADKKDPQGNGTVAGFELLLQKQLKGKQMQKEMSEFIRERIKIEEDYAKNLAKLSQNSLASQEEGSLGEAWAQVKKSLADEAEVHLKFSAKLHSEVEKPLMNFRENFKKDMKKCDHHIADLRKQLASRYASVEKARKALTERQRDLEMKTQQLEIKLSNKTEEDIKKARRKSTQAGDDLMRCVDLYNQAQSKWFEEMVTTTLELERLEVERVEMIRQHLCQYTQLRHETDMFNQSTVEPVDQLLRKVDPAKDRELWVREHKTGNIRPVDMEI

SEQ ID NO: 100 - protein, 412 aa, Homo sapiens
MVPPPPGEESQTVILPPGWQSYLSPQGRRYYVNTTTNETTWERPSSSPGIPASPGSHRSSLPPTVNGYHASGTPAHPPETAHMSVRKSTGDSQNLGSSSPSKKQSKENTITINCVTFPHPDTMPEQQLLKPTEWSYCDYFWADKKDPQGNGTVAGFELLLQKQLKGKQMQKEMSEFIRERIKIEEDYAKNLAKLSQNSLASQEEGSLGEAWAQVKKSLADEAEVHLKFSAKLHSEVEKPLMNFRENFKKDMKKCDHHIADLRKQLASRYASVEKARKALTERQRDLEMKTQQLEIKLSNKTEEDIKKARRKSTQAGDDLMRCVDLYNQAQSKWFEEMVTTTLELERLEVERVEMIRQHLCQYTQLRHETDMFNQSTVEPVDQLLRKVDPAKDRELWVREHKTGNIRPVDMEI

SEQ ID NO: 101 - protein, 336 aa, Homo sapiens
MSNMENSFDDVSCLSPQNLGSSSPSKKQSKENTITINCVTFPHPDTMPEQQLLKPTEWSYCDYFWADKKDPQGNGTVAGFELLLQKQLKGKQMQKEMSEFIRERIKIEEDYAKNLAKLSQNSLASQEEGSLGEAWAQVKKSLADEAEVHLKFSAKLHSEVEKPLMNFRENFKKDMKKCDHHIADLRKQLASRYASVEKARKALTERQRDLEMKTQQLEIKLSNKTEEDIKKARRKSTQAGDDLMRCVDLYNQAQSKWFEEMVTTTLELERLEVERVEMIRQHLCQYTQLRHETDMFNQSTVEPVDQLLRKVDPAKDRELWVREHKTGNIRPVDMEI

SEQ ID NO: 102 - protein, 258 aa, Homo sapiens
MLPLCLVAALLLAAGPGPSLGDEAIHCPPCSEEKLARCRPPVGCEELVREPGCGCCATCALGLGMPCGVYTPRCGSGLRCYPPRGVEKPLHTLMHGQGVCMELAEIEAIQESLQPSDKDEGDHPNNSFSPCSAHDRRCLQKHFAKIRDRSTSGGKMKVNGAPREDARPVPQGSCQSELHRALERLAASQSRTHEDLYIIPIPNCDRNGNFHPKQCHPALDGQRGKCWCVDRKTGVKLPGGLEPKGELDCHQLADSFRE

SEQ ID NO: 103 - protein, 1877 aa, Homo sapiens
MLGSSVKSVQPEVELSSGGGDEGADEPRGAGRKAAAADGRGMLPKRAKAPGGGGGMAKASAAELKVFKSGSVDSRVPGGPPASNLRKQKSLTNLSFLTDSEKKLQLYEPEWSDDMAKAPKGLGKVGSKGREAPLMSKTLSKSEHSLFQAKGSPAGGAKTPLAPLAPNLGKPSRIPRGPYAEVKPLSKAPEAAVSEDGKSDDELLSSKAKAQKSSGPVPSAKGQEERAFLKVDPELVVTVLGDLEQLLFSQMLDPESQRKRTVQNVLDLRQNLEETMSSLRGSQVTHSSLEMTCYDSDDANPRSVSSLSNRSSPLSWRYGQSSPRLQAGDAPSVGGSCRSEGTPAWYMHGERAHYSHTMPMRSPSKLSHISRLELVESLDSDEVDLKSGYMSDSDLMGKTMTEDDDITTGWDESSSISSGLSDASDNLSSEEFNASSSLNSLPSTPTASRRNSTIVLRTDSEKRSLAESGLSWFSESEEKAPKKLEYDSGSLKMEPGTSKWRRERPESCDDSSKGGELKKPISLGHPGSLKKGKTPPVAVTSPITHTAQSALKVAGKPEGKATDKGKLAVKNTGLQRSSSDAGRDRLSDAKKPPSGIARPSTSGSFGYKKPPPATGTATVMQTGGSATLSKIQKSSGIPVKPVNGRKTSLDVSNSAEPGFLAPGARSNIQYRSLPRPAKSSSMSVTGGRGGPRPVSSSIDPSLLSTKQGGLTPSRLKEPTKVASGRTTPAPVNQTDREKEKAKAKAVALDSDNISLKSIGSPESTPKNQASHPTATKLAELPPTPLRATAKSFVKPPSLANLDKVNSNSLDLPSSSDTTHASKVPDLHATSSASGGPLPSCFTPSPAPILNINSASFSQGLELMSGFSVPKETRMYPKLSGLHRSMESLQMPMSLPSAFPSSTPVPTPPAPPAAPTEEETEELTWSGSPRAGQLDSNQRDRNTLPKKGLRYQLQSQEETKERRHSHTIGGLPESDDQSELPSPPALPMSLSAKGQLTNIVSPTAATTPRITRSNSIPTHEAAFELYSGSQMGSTLSLAERPKGMIRSGSFRDPTDDVHGSVLSLASSASSTYSSAEERMQSEQIRKLRRELESSQEKVATLTSQLSANANLVAAFEQSLVNMTSRLRHLAETAEEKDTELLDLRETIDFLKKKNSEAQAVIQGALNASETTPKELRIKRQNSSDSISSLNSITSHSSIGSSKDADAKKKKKKSWVYELRSSFNKAFSIKKGPKSASSYSDIEEIATPDSSAPSSPKLQHGSTETASPSIKSSTSSSVGTDVTEGPAHPAPHTRLFHANEEEEPEKKEVSELRSELWEKEMKLTDIRLEALNSAHQLDQLRETMHNMQLEVDLLKAENDRLKVAPGPSSGSTPGQVPGSSALSSPRRSLGLALTHSFGPSLADTDLSPMDGISTCGPKEEVTLRVVVRMPPQHIIKGDLKQQEFFLGCSKVSGKVDWKMLDEAVFQVFKDYISKMDPASTLGLSTESIHGYSISHVKRVLDAEPPEMPPCRRGVNNISVSLKGLKEKCVDSLVFETLIPKPMMQHYISLLLKHRRLVLSGPSGTGKTYLTNRLAEYLVERSGREVTEGIVSTFNMHQQSCKDLQLYLSNLANQIDRETGIGDVPLVILLDDLSEAGSISELVNGALTCKYHKCPYIIGTTNQPVKMTPNHGLHLSFRMLTFSNNVEPANGFLVRYLRRKLVESDSDINANKEELLRVLDWVPKLWYHLHTFLEKHSTSDFLIGPCFFLSCPIGIEDFRTWFIDLWNNSIIPYLQEGAKDGIKVHGQKAAWEDPVEWVRDTLPWPSAQQDQSKLYHLPPPTVGPHSIASPPEDRTVKDSTPSSLDSDPLMAMLLKLQEAANYIESPDRETILDPNLQATL

SEQ ID NO: 104 - protein, 1483 aa, Homo sapiens
MLHLPLPRSGRTVNFPRSWDESSSISSGLSDASDNLSSEEFNASSSLNSLPSTPTASRRNSTIVLRTDSEKRSLAESGLSWFSESEEKAPKKLEYDSGSLKMEPGTSKWRRERPESCDDSSKGGELKKPISLGHPGSLKKGKTPPVAVTSPITHTAQSALKVAGKPEGKATDKGKLAVKNTGLQRSSSDAGRDRLSDAKKPPSGIARPSTSGSFGYKKPPPATGTATVMQTGGSATLSKIQKSSGIPVKPVNGRKTSLDVSNSAEPGFLAPGARSNIQYRSLPRPAKSSSMSVTGGRGGPRPVSSSIDPSLLSTKQGGLTPSRLKEPTKVASGRTTPAPVNQTDREKEKAKAKAVALDSDNISLKSIGSPESTPKNQASHPTATKLAELPPTPLRATAKSFVKPPSLANLDKVNSNSLDLPSSSDTTHASKVPDLHATSSASGGPLPSCFTPSPAPILNINSASFSQGLELMSGFSVPKETRMYPKLSGLHRSMESLQMPMSLPSAFPSSTPVPTPPAPPAAPTEEETEELTWSGSPRAGQLDSNQRDRNTLPKKGLRYQLQSQEETKERRHSHTIGGLPESDDQSELPSPPALPMSLSAKGQLTNIVSPTAATTPRITRSNSIPTHEAAFELYSGSQMGSTLSLAERPKGMIRSGSFRDPTDDVHGSVLSLASSASSTYSSAEERMQSEQIRKLRRELESSQEKVATLTSQLSANANLVAAFEQSLVNMTSRLRHLAETAEEKDTELLDLRETIDFLKKKNSEAQAVIQGALNASETTPKELRIKRQNSSDSISSLNSITSHSSIGSSKDADAKKKKKKSWLRSSFNKAFSIKKGPKSASSYSDIEEIATPDSSAPSSPKLQHGSTETASPSIKSSTSSSVGTDVTEGPAHPAPHTRLFHANEEEEPEKKEVSELRSELWEKEMKLTDIRLEALNSAHQLDQLRETMHNMQLEVDLLKAENDRLKVAPGPSSGSTPGQVPGSSALSSPRRSLGLALTHSFGPSLADTDLSPMDGISTCGPKEEVTLRVVVRMPPQHIIKGDLKQQEFFLGCSKVSGKVDWKMLDEAVFQVFKDYISKMDPASTLGLSTESIHGYSISHVKRVLDAEPPEMPPCRRGVNNISVSLKGLKEKCVDSLVFETLIPKPMMQHYISLLLKHRRLVLSGPSGTGKTYLTNRLAEYLVERSGREVTEGIVSTFNMHQQSCKDLQLYLSNLANQIDRETGIGDVPLVILLDDLSEAGSISELVNGALTCKYHKCPYIIGTTNQPVKMTPNHGLHLSFRMLTFSNNVEPANGFLVRYLRRKLVESDSDINANKEELLRVLDWVPKLWYHLHTFLEKHSTSDFLIGPCFFLSCPIGIEDFRTWFIDLWNNSIIPYLQEGAKDGIKVHGQKAAWEDPVEWVRDTLPWPSAQQDQSKLYHLPPPTVGPHSIASPPEDRTVKDSTPSSLDSDPLMAMLLKLQEAANYIESPDRETILDPNLQATL

SEQ ID NO: 105 - protein, 931 aa, Homo sapiens
MKIQKKLTGCSRLMLLCLSLELLLEAGAGNIHYSVPEETDKGSFVGNIAKDLGLQPQELADGGVRIVSRGRMPLFALNPRSGSLITARRIDREELCAQSMPCLVSFNILVEDKMKLFPVEVEIIDINDNTPQFQLEELEFKMNEITTPGTRVSLPFGQDLDVGMNSLQSYQLSSNPHFSLDVQQGADGPQHPEMVLQSPLDREEEAVHHLILTASDGGEPVRSGTLRIYIQVVDANDNPPAFTQAQYHINVPENVPLGTQLLMVNATDPDEGANGEVTYSFHNVDHRVAQIFRLDSYTGEISNKEPLDFEEYKMYSMEVQAQDGAGLMAKVKVLIKVLDVNDNAPEVTITSVTTAVPENFPPGTIIALISVHDQDSGDNGYTTCFIPGNLPFKLEKLVDNYYRLVTERTLDRELISGYNITITAIDQGTPALSTETHISLLVTDINDNSPVFHQDSYSAYIPENNPRGASIFSVRAHDLDSNENAQITYSLIEDTIQGAPLSAYLSINSDTGVLYALRSFDYEQFRDMQLKVMARDSGDPPLSSNVSLSLFLLDQNDNAPEILYPALPTDGSTGVELAPLSAEPGYLVTKVVAVDRDSGQNAWLSYRLLKASEPGLFSVGLHTGEVRTARALLDRDALKQSLVVAVQDHGQPPLSATVTLTVAVADRISDILADLGSLEPSAKPNDSDLTLYLVVAAAAVSCVFLAFVIVLLAHRLRRWHKSRLLQASGGGLASMPGSHFVGVDGVRAFLQTYSHEVSLTADSRKSHLIFPQPNYADTLISQESCEKKGFLSAPQSLLEDKKEPFSQQAPPNTDWRFSQAQRPGTSGSQNGDDTGTWPNNQFDTEMLQAMILASASEAADGSSTLGGGAGTMGLSARYGPQFTLQHVPDYRQNVYIPGSNATLTNAAGKRDGKAPAGGNGNKKKSGKKEKK

SEQ ID NO: 106 - protein, 932 aa, Homo sapiens
MAALQKLPHCRKLVLLCFLLATLWEARAGQIRYSVREEIDRGSFVGNIAKDLGLEPLALAEQGVRIVSRGRSQLFALNPRSGSLVTANRIDREELCAQSAPCLLNFNILLEDKLTIYSVEVEITDINDNAPRFGVEELELKISETTTPGFRIPLKNAHDADVGENALQKYALNPNDHFSLDVRRGADGNKYPELVLERSLDREEEAVHHLVLVASDGGDPVLSGTSRICVKVLDANDNAPVFTQPEYRISIPENTLVGTRILTVTATDADEGYYAQVVYFLEKSPGETSEVFELKSTSGELTIIKDLDYEDATFHEIDIEAQDGPGLLTRAKVIVTVLDVNDNAPEFYMTSATSSVSEDSLPGTIIGLFNVHDRDSGQNAFTTCSLPEDLPFKLEKSVDNYYRLVTTRALDREQFSFYNITLTAKDGGNPSLSTDAHILLQVADINDNAPAFSRTSYSTYIPENNPRGASVFSVTAHDPDSNDNAHVTYSFAEDTVQGAPLSSYISINSDTGVLYALRSFDYEQLRDLQVWVIARDSGNPPLSSNVSLSLFVLDQNDNAPEILYPAFPTDGSTGVELAPRSAEPGYLVTKVVAVDRDSGQNAWLSYHLLKASEPGLFSVGLHTGEVRTARALLDRDALKQSLVVAIQDHGQPPLSATVTLTVAVADRIPDILADLGSLEPSAIPNDSDLTLYLVVAVAAVSCVFLAFVIVLLAHRLRRWHKSRLLQASGGSLTGMQSSHFVGVDGVRAFLQTYSHEVSLTADSRKSHLIFPQPNYADTLISQESCEKKDFLSAPQSLLEEEREETFSQQAPPNTDWRFSQAQRPGTSGSQNGDDTGTWPNNQFDTEMLQAMILASASEAADGSSTLGGGAGTMGLSARYGPQFTLQHVPDYRQNVYIPGSNATLTNAAGKRDGKAPAGGNGNKKKSGKKEKK

SEQ ID NO: 107 - protein, 927 aa, Homo sapiens
MQRAREAEMMKSQVLFPFLLSLFCGAISQQIRYTIPEELANGSRVGKLAKDLGLSVRELPTRKLRVSAEDYFNVSLESGDLLVNGRIDREKICGRKLECALEFETVAENPMNVFHVVVVIQDINDNAPRFVAKGIDLEICESALPGVKFSLDSAQDADVEGNSLKLYTINPNQYFSLSTKESPDGSKYPVLLLEKPLDREHQSSHRLILTAMDGGDPPLSGTTHIWIRVTDANDNAPVFSQEVYRVSLQENVPWGTSVLRVMATDQDEGINAEITYAFLNSPISTSLFNLNPNTGDITTNGTLDFEETSRYVLSVEAKDGGVHTAHCNVQIEIVDENDNAPEVTFMSFSNQIPEDSDLGTVIALIKVRDKDSGQNGMVTCYTQEEVPFKLESTSKNYYKLVIAGALNREQTADYNVTIIATDKGKPALSSRTSITLHISDINDNAPVFHQASYVVHVSENNPPGASIAQVSASDPDLGPNGRVSYSILASDLEPRELLSYVSVSPQSGVVFAQRAFDHEQLRAFELTLQARDQGSPALSANVSLRVLVGDLNDNAPRVLYPALGPDGSALFDMVPRAAEPGYLVTKVVAVDADSGHNAWLSYHVLQASEPGLFSLGLRTGEVRTARALGDRDAARQRLLVAVRDGGQPPLSATATLHLIFADSLQEVLPDLSDRPEPSDPQTELQFYLVVALALISVLFLLAVILAIALRLRRSSSLDTEGCFQTGLCSKSGPGVPPNHSEGTLPYSYNLCIASHSAKTEFNSLNLTPEMAPPQDLLCDDPSMVVCASNEDHKIAYDPSLSSHQAPPNTDWRFSQAQRPGTSGSQNGDDTGTWPNNQFDTEMLQAMILASASEAADGSSTLGGGAGTMGLSARYGPQFTLQHVPDYRQNVYIPGSNATLTNAAGKRDGKAPAGGNGNKKKSGKKEKK

SEQ ID NO: 108 - protein, 931 aa, Homo sapiens
MAAPPARPDHTRLLQICLLLGVLVEIRAEQILYSVFEEQEEGSVVGNIAKDLGLAPRELAERGVRIVSRGRTQLFALNPRSGTLVTAGRIDREELCDRSPNCVTNLEILLEDTVKILRVEVEIIDVNDNPPSFGTEQREIKVAENENPGARFPLPEAFDPDVGVNSLQGYQLNSNGYFSLDVQSGADGIKYPELVLERALDREEEAVHHLVLTAFDGGDPVRSGTARILIILVDTNDNAPVFTQPEYHVSVRENVPVGTRLLTVKATDPDEGANGDVTYSFRKVRDKISQLFQLNSLSGDITILGGLDYEDSGFYDIDVEAHDGPGLRARSKVLVTVLDENDNAPEVTVTSLTSSVQESSSPGTVIALFNVHDSDSGGNGLVTCSIPDNLPFTLEKTYGNYYRLLTHRTLDREEVSEYNITVTATDQGTPPLSTETHISLQVMDINDNPPTFPHASYSAYIPENNPRGASILSMTAQDPDSGDNARITYSLAEDTFQGAPLSSYVSINSNTGILYALCSFDYEQFRDLQLLMTASDSGDPPLSSNVSLSLFVLDQNDNVPEILYPTFPTDGSTGVELAPRSADSGYLVTKVVAVDRDSGQNAWLSYSLLKSSEPGLFAVGLHTGEVRTARALLDRDALKQRLVVVVQDHGQPPLSATVTLTVAVADSIPDVLADLGSLKPSADPDDSGLTLYLVVAVAAVSCVFLAFVTVLLALKLRRWHKSRLLHAEGSRLAGVPASHFVGVDGVRAFLQTYSHEVSLTADSRKSHLIFSQPSYADTLISRESCEKSEPLLITQDLLETKGDPNLQQAPPNTDWRFSQAQRPGTSGSQNGDDTGTWPNNQFDTEMLQAMILASASEAADGSSTLGGGAGTMGLSARYGPQFTLQHVPDYRQNVYIPGSNATLTNAAGKRDGKAPAGGNGNKKKSGKKEKK

SEQ ID NO: 109 - protein, 931 aa, Homo sapiens
MKASSGRCGLVRWLQVLLPFLLSLFPGALPVQIRYSIPEELAKNSVVGNLAKDLGLSVRDLPARKLRVSAEKEYFTVNPESGDLLVSDRIDREQICGKQPLCVLDFDTVAENPLNIFYIAVIVQDINDNTPLFKQTKINLKIGESTKPGTTFPLDPALDSDVGPNSLQRYHLNDNEYFDLAEKQTPDGRKYPELILKHSLDREEHSLHQLVLTAVDGGDPPQSGTTQIRIKVTDANDNPPVFSQDVYRVTLREDVPPGFFVLQVTATDRDEGINAEITYSFHNVDEQVKHFFNLNEKTGEITTKDDLDFEIASSYTLSIEAKDPGDLAAHCSIQVEILDDNDCAPEVIVTSVSTPLPEDSPPGTVIALIKTRDRDSGENGEVYCQVLGNAKFILKSSSKNYYKLVTDGALDREEIPEYNLTITATDGGKPPLSSSIIVTLHISDVNDNAPVFQQTSYMVHVAENNPPGASIAQISASDPDLGPSGQVSYSIVASDLKPREILSYVSVSAQSGVVFAQRAFDHEQLRAFELTLQARDQGSPALSANVSLRVLVGDLNDNAPRVLYPALGPDGSALFDMVPRAAEPGYLVTKVVAVDADSGHNAWLSYHVLQASEPGLFSLGLRTGEVRTARALGDRDAARQRLLVAVRDGGQPPLSATATLHLIFADSLQEVLPDLSDRREPSDPQAKLQFYLVVALALISVLFFLAVILAISLRLRLSSRSDAWDCFQPGLSSKPGPGVLPNYSEGTLPYSYNLCVASQSAKTEFNFLNITPELVPAQDLVCDNASWEQNTNHGAAGVPFASDTILKQAPPNTDWRFSQAQRPGTSGSQNGDDTGTWPNNQFDTEMLQAMILASASEAADGSSTLGGGAGTMGLSARYGPQFTLQHVPDYRQNVYIPGSNATLTNAAGKRDGKAPAGGNGNKKKSGKKEKK

SEQ ID NO: 110 - protein, 931 aa, Homo sapiens
MASPPRGWGCGELLLPFMLLGTLCEPGSGQIRYSMPEELDKGSFVGNIAKDLGLEPQELAERGVRIVSRGRTQLFALNPRSGSLVTAGRIDREELCAQSPLCVVNFNILVENKMKIYGVEVEIIDINDNFPRFRDEELKVKVNENAAAGTRLVLPFARDADVGVNSLRSYQLSSNLHFSLDVVSGTDGQKYPELVLEQPLDREKETVHDLLLTALDGGDPVLSGTTHIRVTVLDANDNAPLFTPSEYSVSVPENIPVGTRLLMLTATDPDEGINGKLTYSFRNEEEKISETFQLDSNLGEISTLQSLDYEESRFYLMEVVAQDGGALVASAKVVVTVQDVNDNAPEVILTSLTSSISEDCLPGTVIALFSVHDGDSGENGEIACSIPRNLPFKLEKSVDNYYHLLTTRDLDREETSDYNITLTVMDHGTPPLSTESHIPLKVADVNDNPPNFPQASYSTSVTENNPRGVSIFSVTAHDPDSGDNARVTYSLAEDTFQGAPLSSYVSINSDTGVLYALRSFDYEQLRDLQLWVTASDSGNPPLSSNVSLSLFVLDQNDNTPEILYPALPTDGSTGVELAPRSAEPGYLVTKVVAVDKDSGQNAWLSYRLLKASEPGLFAVGLHTGEVRTARALLDRDALKQSLVVAVEDHGQPPLSATFTVTVAVADRIPDILADLGSIKTPIDPEDLDLTLYLVVAVAAVSCVFLAFVIVLLVLRLRRWHKSRLLQAEGSRLAGVPASHFVGVDGVRAFLQTYSHEVSLTADSRKSHLIFPQPNYADTLLSEESCEKSEPLLMSDKVDANKEERRVQQAPPNTDWRFSQAQRPGTSGSQNGDDTGTWPNNQFDTEMLQAMILASASEAADGSSTLGGGAGTMGLSARYGPQFTLQHVPDYRQNVYIPGSNATLTNAAGKRDGKAPAGGNGNKKKSGKKEKK

SEQ ID NO: 111 - protein, 929 aa, Homo sapiens
MGNSSGWRGPAGQRRMLFLFLLSLLDQVLSEPIRYAIPEELDRGSLVGNLAKDLGFGVGDLPTRNLRVIAEKKFFTVSPENGNLLVSDRIDREEICGKKSTCVLEFEMVAEKPLNFFHVTVLIQDINDNPPTFSQNITELEISELALTGATFALESAQDPDVGVNSLQQYYLSPDPHFSLIQKENLDGSRYPELVLKAPLDREEQPHHHLVLTAVDGGEPSRSCTTQIRVIVADANDNPPVFTQDMYRVNVAENLPAGSSVLKVMAIDMDEGINAEIIYAFINIGKEVRQLFKLDSKTGELTTIGELDFEERDSYTIGVEAKDGGHHTAYCKVQIDISDENDNAPEITLASESQHIQEDAELGTAVALIKTHDLDSGFNGEILCQLKGNFPFKIVQDTKNTYRLVTDGALDREQIPEYNVTITATDKGNPPLSSSKTITLHILDVNDNVPVFHQASYTVHVAENNPPGASIAHVRASDPDLGPNGLVSYYIVASDLEPRELSSYVSVSARSGVVFAQRAFDHEQLRAFELTLQARDQGSPTLSANVSLRVLVDDRNDNAPLVLYPALGPEGSALFDMVPRSAEPGYLVTKVVAVDADSGYNAWLSYHIVQASEPGLFSLGLRTGEVRTARTLGDREAARQRLLVTVRDGGQQPLSATVMLHLIFADSLQEIQPDLSDRPTPSDPQAELQFHLVVALALISVLFLLAVILAISLRLRCSSRPATEGYFQPGVCFKTVPGVLPTYSERTLPYSYNPCAASHSSNTEFKFLNIKAENAAPQDLLCDEASWFESNDNPEMPSNSGNLQKQAPPNTDWRFSQAQRPGTSGSQNGDDTGTWPNNQFDTEMLQAMILASASEAADGSSTLGGGAGTMGLSARYGPQFTLQHVPDYRQNVYIPGSNATLTNAAGKRDGKAPAGGNGNKKKSGKKEKK

SEQ ID NO: 112 - protein, 932 aa, Homo sapiens
MAPPQRHPQRSEQVLLLTLLGTLWGAAAAQIRYSIPEELEKGSFVGNIVKDLGLEPQELAEHGVRIVSRGRMQLFSLNPRNGSLVTAGRIDREELCAQSPRCLVSFNILVEDKLNLYPVEVEIVDINDNTPRFLKEELEVKILENAAPSSRFPLMEVYDPDVGMNSLQGFKLSGNSHFSVDVQSEAHGPKYPELVLEGTLDREGEAVYRLVLTAMDGGDPVRSSVAQILVTVLDVNDNTPMFTQPVYRVSVPENLPVGTPVLAVTATDQDEGVHGEVTYSFVKITEKISQIFCLNVLTGEISTSANLDYEDSSFYELGVEARDGPGLRDRAKVLITILDVNDNVPEVVVTSGSRTIAESAPPGTVIALFQVFDRDSGLNGLVTCSIPRSLPFELEKSVGNYYRLVTNAALDREEVFLYNITVTATDKGTPPLSTETIISLNVADTNDNPPTFPHSSYSVYVLENNPRGASIFSVNALDPDVDQNAQVSYSLAEDTLQGAPLSSYVSINSDTGILYALRSFDYEQLRDLQLWVTASDSGDPPLSSNVSLSLFVLDQNDNAPEILYPALPTDGSTGVELAPRSAEPGYLVTKVVAVDRDSGQNAWLSYRLLKASEPGLFSVGLHTGEVRTARALLDRDALKQSLVVAVQDHGQPPLSATVTLTVAVADRIPDILADLGSLEPSAKPNDSDLTLYLVVAVAAVSCVFLAFVIVLLALRLQRWHKSRLLQASGGGLASMPGSHFVGVEGVRAFLQTYSHEVSLTADSRKSHLIFPQPNYADTLINQESYEKSEPLLITQDLLETKGEPRQLQQAPPNTDWRFSQAQRPGTSGSQNGDDTGTWPNNQFDTEMLQAMILASASEAADGSSTLGGGAGTMGLSARYGPQFTLQHVPDYRQNVYIPGSNATLTNAAGKRDGKAPAGGNGNKKKSGKKEKK

SEQ ID NO: 113 - protein, 932 aa, Homo sapiens
MAAQPRGGDYRGFFLLSILLGTPWEAWAGRILYSVSEETDKGSFVGDIAKDLGLEPRELAERGVRIISRGRTQLFALNQRSGSLVTAGRIDREEICAQSARCLVNFNILMEDKMNLYPIDVEIIDINDNVPRFLTEEINVKIMENTAPGVRFPLSEAGDPDVGTNSLQSYQLSPNRHFSLAVQSGDDETKYPELVLERVLDREEERVHHLVLTASDGGDPPRSSTAHIQVTVVDVNDHTPVFSLPQYQVTVPENVPVGTRLLTVHAIDLDEGVNGEVTYSFRKITPKLPKMFHLNSLTGEISTLEGLDYEETAFYEMEVQAQDGPGSLTKAKVLITVLDVNDNAPEVTMTSLSSSIPEDTPLGTVIALFYLQDRDSGKNGEVTCTIPENLPFKLEKSIDNYYRLVTTKNLDRETLSLYNITLKATDGGTPPLSRETHIFMQVADTNDNPPTFPHSSYSVYIAENNPRGASIFLVTAQDHDSEDNAQITYSLAEDTIQGAPVSSYVSINSDTGVLYALQSFDYEQLRELQLRVTAHDSGDPPLSSNMSLSLFVLDQNDNPPEILYPALPTDGSTGMELAPRSAEPGYLVTKVVAVDKDSGQNAWLSYLLLKASEPGLFAVGLYTGEVRTARALLDRDALKQSLVVAVQDHGQPPLSATVTLTVAVADSIPEVLADLGSLEPSDGPYNYDLTLYLVVAVATVSCVFLAFVLVLLALRLRRWHKSRLLQASEGGLANVPTSHFVGMDGVQAFLQTYSHEVSLTADSRKSHLIFPQPNYVDMLISQESCEKNDSLLTSVDFQECKENLPSIQQAPPNTDWRFSQAQRPGTSGSQNGDDTGTWPNNQFDTEMLQAMILASASEAADGSSTLGGGAGTMGLSARYGPQFTLQHVPDYRQNVYIPGSNATLTNAAGKRDGKAPAGGNGNKKKSGKKEKK

SEQ ID NO: 114 - protein, 923 aa, Homo sapiens
MGSGAGELGRAERLPVLFLFLLSLFCPALCEQIRYRIPEEMPKGSVVGNLATDLGFSVQELPTRKLRVSSEKPYFTVSAESGELLVSSRLDREEICGKKPACALEFEAVAENPLNFYHVNVEIEDINDHTPKFTQNSFELQISESAQPGTRFILGSAHDADIGSNTLQNYQLSPSDHFSLINKEKSDGSKYPEMVLKTPLDREKQKSYHLTLTALDFGAPPLSSTAQIHVLVTDANDNAPVFSQDVYRVSLSENVYPGTTVLQVTATDQDEGVNAEITFSFSEASQITQFDLNSNTGEITVLNTLDFEEVKEYSIVLEARDGGGMIAQCTVEVEVIDENDNAPEVIFQSLPNLIMEDAELGTHIALLKVRDKDSRHNGEVTCKLEGDVPFKILTSSRNTYKLVTDAVLDREQNPEYNITVTATDRGKPPLSSSSSITLHIGDVNDNAPVFSQSSYIVHVAENNPPGASISQVRASDPDLGPNGQVSYCIMASDLEQRELSSYVSISAESGVVFAQRAFDHEQLRAFELTLQARDQGSPALSANVSLRVLVDDRNDNAPRVLYPALGPDGSALFDMVPHAAEPGYLVTKVVAVDADSGHNAWLSYHVLQASEPGLFSLGLRTGEVRTARALGDRDAVRQRLLVAVRDGGQPPLSATATLHLVFADSLQEVLPDITDRPDPSDLQAELQFYLVVALALISVLFLVAMILAIALRLRRSSSPASWSCFQPGLCVKSESVVPPNYSEGTLPYSYNLCVAHTGKTEFNFLKCSEQLSSGQDILCGDSSGALFPLCNSSELTSHQQAPPNTDWRFSQAQRPGTSGSQNGDDTGTWPNNQFDTEMLQAMILASASEAADGSSTLGGGAGTMGLSARYGPQFTLQHVPDYRQNVYIPGSNATLTNAAGKRDGKAPAGGNGNKKKSGKKEKK

SEQ ID NO: 115 - protein, 932 aa, Homo sapiens
MAAPQSRPRRGELILLCALLGTLWEIGRGQIRYSVPEETDKGSFVGNISKDLGLDPRKLAKHGVRIVSRGRTQLFALNPRSGSLITAGRIDREELCAQSPRCLININTLVEDKGKLFGVEIEIIDINDNNPKFQVEDLEVKINEIAVPGARYPLPEAVDPDVGVNSLQSYQLSPNHHFSLDVQTGDNGAINPELVLERALDREEEAAHHLVLTASDGGKPPRSSTVRIHVTVLDTNDNAPVFPHPIYRVKVLENMPPGTRLLTVTASDPDEGINGKVAYKFRKINEKQTPLFQLNENTGEISIAKSLDYEECSFYEMEIQAEDVGALLGRTKLLISVEDVNDNRPEVIITSLFSPVLENSLPGTVIAFLSVHDQDSGKNGQVVCYTRDNLPFKLEKSIGNYYRLVTRKYLDRENVSIYNITVMASDLGTPPLSTETQIALHVADINDNPPTFPHASYSAYILENNLRGASIFSLTAHDPDSQENAQVTYSVTEDTLQGAPLSSYISINSDTGVLYALQSFDYEQIRDLQLLVTASDSGDPPLSSNMSLSLFVLDQNDNAPEILYPALPTDGSTGVELAPRSAERGYLVTKVVAVDRDSGQNAWLSYRLLKASEPGLFSVGLHTGEVRTARALLDRDALKQSLVVAVQDHGQPPLSATVTLTVAVADSIPEVLTELGSLKPSVDPNDSSLTLYLVVAVAAISCVFLAFVAVLLGLRLRRWHKSRLLQDSGGRLVGVPASHFVGVEEVQAFLQTYSQEVSLTADSRKSHLIFPQPNYADMLISQEGCEKNDSLLTSVDFHEYKNEADHGQQAPPNTDWRFSQAQRPGTSGSQNGDDTGTWPNNQFDTEMLQAMILASASEAADGSSTLGGGAGTMGLSARYGPQFTLQHVPDYRQNVYIPGSNATLTNAAGKRDGKAPAGGNGNKKKSGKKEKK

SEQ ID NO: 116 - protein, 923 aa, Homo sapiens
MGSGAGELGRAERLPVLFLFLLSLFCPALCEQIRYRIPEEMPKGSVVGNLATDLGFSVQELPTRKLRVSSEKPYFTVSAESGELLVSSRLDREEICGKKPACALEFEAVAENPLNFYHVNVEIEDINDHTPKFTQNSFELQISESAQPGTRFILEVAEDADIGLNSLQKYKLSLNPSFSLIIKEKQDGSKYPELALEKTLDREQQSYHRLVLTALDGGHPPLSGTTELRIQVTDANDNPPVFNRDVYRVSLRENVPPGTTVLQVSATDQDEGINSEITYSFYRTGQIFSLNSKSGEITTQKKLDFEETKEYSMVVEGRDGGGLVAQCTVEINIQDENDNSPEVTFHSLLEMILENAVPGTLIALIKIHDQDSGENGEVNCQLQGEVPFKIISSSKNSYKLVTDGTLDREQTPEYNVTITATDRGKPPLSSSISVILHIRDVNDNAPVFHQASYLVSVPENNPPGASIAQVCASDLDLGLNGQVSYSIMASDLEPLALASYVSMSAQSGVVFAQRAFDYEQLRTFELTLQARDQGSPALSANVSLRVLVGDRNDNAPRVLYPALGPDGSALFDMVPRAAEPGYLVTKVVAVDADSGHNAWLSYHVLQASEPGLFSLGLRTGEVRTARALGDRDAARQRLLVAVRDGGQPPLSATATLHLVFADSLQEVLPDITDRPVPSDPQAELQFYLVVALALISVLFLLAVILAVALRLRRSSSPAAWSCFQPGLCVKSGPVVPPNYSQGTLPYSYNLCVAHTGKTEFNFLKCSEQLSSGQDILCGDSSGALFPLCNSSESTSHPELQAPPNTDWRFSQAQRPGTSGSQNGDDTGTWPNNQFDTEMLQAMILASASEAADGSSTLGGGAGTMGLSARYGPQFTLQHVPDYRQNVYIPGSNATLTNAAGKRDGKAPAGGNGNKKKSGKKEKK

SEQ ID NO: 117 - protein, 932 aa, Homo sapiens
MAAPTKCQLRGRLVLLCSLLGMLWEARASQIRYSVPEETEKGYIVGNISKDLALEPRELAERRVRIVSRGRTQLFSLNPRSGTLVTAGRIDREELCAQSPRCLVNFKVLVEDRVKLYGIEIEVTDINDSAPKFQAESLEVKINEIAVPGARYPLPEAIDPDVGVNSLQSYQLSPNHHFSLNVQTGDNGAINPELVLERALDREEATAHHLVLTASDGGEPRRSSTVRIHVTVLDTNDNAPVFAQRIYRVKVLENVPPGTWLLTATASDLDEGINGKVAYKFWKINEKQSLLFQLNENTGEISTAKSLDYEECSFYEMEIQAEDGGGLKGWTKVLISVEDVNDNRPEVTITSLFSPVREDAPQGTVILLFNAHDRDSGKNGQVVCSIQENLSFTLENSEEDYYRLLTAQILDREKASEYNITVTATDRGTPPLSTEIHITLQVTDINDNPPAFSQASYSVYLPENNARGTSIFSVIAYDPDSNENSRVIYSLAEDTIQGSPLSTYVSINSDTGVLYALCSFDYEQFRDLQMQVTASDSGSPPLSSNVSLRLFVLDQNDNAPEILYPALPTDGSTGVELAPRSAEPGYLVTKVVAVDRDSGQNAWLSYRLFKASEPGLFSVGLHTGEVRTARALLDRDALKQSLVVAVQDHGQPPLSATVTLTVAIADSIPDILADLGSLQIPADLEASDLTLYLVVAVAVVSCVFLTFVITLLALRLRHWHSSHLLRATSDGLAGVPTSHFVGVDGVRAFLQTYSQEFSLTADSRKSHLIFPQPNYADTLISQQSCEKNEPLCVSVDSKFPIEDTPLVPQAPPNTDWRFSQAQRPGTSGSQNGDDTGTWPNNQFDTEMLQAMILASASEAADGSSTLGGGAGTMGLSARYGPQFTLQHVPDYRQNVYIPGSNATLTNAAGKRDGKAPAGGNGNKKKSGKKEKK

SEQ ID NO: 118 - protein, 930 aa, Homo sapiens
MGGSCAQRRRAGPRQVLFPLLLPLFYPTLSEPIRYSIPEELAKGSVVGNLAKDLGLSVLDVSARKLRVSAEKLHFSVDAESGDLLVKNRIDREQICKERRRCELQLEAVVENPLNIFHVIVVIEDVNDHAPQFDKKEIHLEIFESASAGTRLSLDPATDPDININSIKDYKINSNPYFSLMVRVNSDGGKYPELSLEKLLDREEQRSHSLILTALDGGDPPRSATAHIEISVKDTNDNPPVFSRDEYRISLSENLPPGSPVLQVTATDQDEGVNAEINYYFRSTAQSTKHMFSLDEKTGMIKNNQSFDFEDVERYTMEVEAKDGGGLSTQCKVIIEILDENDNSPEIIITSLSDQILENSPPGMVVALFKTRDLDFGGNGEVRCNIETDIPFKIYSSSNNYYKLVTDGALDREQTPEYNVTIVATDRGKPPLSSSRSITLYVADINDNAPVFDQTSYVVHVAENNPPGASIAQVSASDPDLGLNGHISYSIVASDLEPLAVSSYVSVSAQSGVVFAQRAFDHEQLRAFALTLQARDHGSPTLSANVSLRVLVGDRNDNAPRVLYPALGPDGSAFFDMVPRSAEPGYLVTKVVAVDADSGHNAWLSYHVLQASEPGLFSLGLRTGEVRTARALGDRDAARQRLLVAVRDGGQPPLSATATLHLVFADNLQEILPDLSDRPVLSDPQAELQFYLVVALALISVLFLLAVILAIALRLRRSLSPATWDCFHPGLCVKSGPVVPPNYSEGTLPYSYNLCIAHTGTKEFNFLKCSVPLHSNEDMVCSVSPGALIPPHGGEDLTSHPETLTSQAPPNTDWRFSQAQRPGTSGSQNGDDTGTWPNNQFDTEMLQAMILASASEAADGSSTLGGGAGTMGLSARYGPQFTLQHVPDYRQNVYIPGSNATLTNAAGKRDGKAPAGGNGNKKKSGKKEKK

SEQ ID NO: 119 - protein, 936 aa, Homo sapiens
MAAQRNRSKESKDCSGLVLLCLFFGIPWEAGARQISYSIPEELEKGSFVGNISKDLGLAPRELAERGVRIVSRGRTQLFSLNPRSGSLITAGRIDREELCAQSARCVVSFNILVEDRVKLFGIEIEVTDINDNAPKFQAENLDVKINENVAAGMRFPLPEAIDPDVGVNSLQSYQLSPNKHFSLRVQSRANGVKYPELVLEHSLDREEEAIHHLVLTASDGGDPLRSGTVLVSVTVFDANDNAPVFTLPEYRVSVPENLPVGTQLLTVTATDRDEGANGEVTYSFRKLPDTQLLKFQLNKYTGEIKISENLDYEETGFYEIEIQAEDGGAYLATAKVLITVEDVNDNSPELTITSLFSPVTEDSPLGTVVALLNVHDLDSEQNGQVTCSILAYLPFKLEKSIDSYYRLVIHRALDREQVSSYNITVTATDGGSPPLSTEAHFMLQVADINDNPPTFSQVSYFTYIPENNARGASIFSVTALDPDSKENAQIIYSLAEDTIQGVPLSSYISINSDTGVLYALRSFDYEQFHELQMQVTASDSGDPPLSSNVSLSLFVLDQNDNAPEILYPALPTDGSTGVELAPRSAEPGYLVTKVVAVDRDSGQNAWLSYRLLKASEPGLFAVGEHTGEVRTARALLDRDALKQSLVVAVQDHGQPPLSATVTLTVAVADSIPQVLADLGSFESPANSETSDLTLYLVVAVAAVSCVFLAFVIVLLAHRLRRWHKSRLLQASGGGLTGVSGSHFVGVDGVRAFLQTYSHEVSLTADSRKSHLIFPQPNYADTLISQESCEKNDPLSLLDDSKFPIEDTPLVPQAPPNTDWRFSQAQRPGTSGSQNGDDTGTWPNNQFDTEMLQAMILASASEAADGSSTLGGGAGTMGLSARYGPQFTLQHVPDYRQNVYIPGSNATLTNAAGKRDGKAPAGGNGNKKKSGKKEKK

SEQ ID NO: 120 - protein, 935 aa, Homo sapiens
MANRLQRGDRSRLLLLLCIFLGTLRGFRARQIRYSVPEETEKGSFVGNISKDLGLEPRELAKRGVRIVSRGKTQLFAVNPRSGSLITAGRIDREELCETVSSCFLNMELLVEDTLKIYGVEVEIIDINDNAPSFQEDEVEIKVSEHAIPGARFALPNARDPDVGVNSLQSYQLSPNNYFSLQLRGRTDGAKNPELVLEGSLDREKEAAHLLLLTALDGGDPIRKGAVPIRVVVLDVNDHIPMFTQSVYRVSVPENISSGTRVLMVNATDPDEGINGEVMYSFRNMESKASEIFQLDSQTGEVQVRGSLDFEKYRFYEMEIQGQDGGGLFTTTTMLITVVDVNDNAPEITITSSINSILENSPPGTVIALLNVQDQDSGENGQVSCFIPNHLPFKLEKTYGNYYKLITSRVLDRELVQSYNITLTATDQGSPPLSAETHVWLNVADDNDNPPVFPHSSYSAYIPENNPRGASIFSVTALDPDSKQNALVTYSLTDDTVQGVPLSSYVSINSNTGVLYALQSFDYEQFRDLELRVIARDSGDPPLSSNVSLSLFVLDQNDNAPEILYPALPTDGSTGVELAPRSAEPGYLVTKVVAVDKDSGQNAWLSYRLLKASEPGLFAVGEHTGEVRTARALLDRDALKQSLVVAVQDHGQPPLSATVTLTVAVADSIPEVLADLGSLESLANSETSDLSLYLVVAVAAVSCIFLVFVIVLLALRLWRWHKSRLLQASEGGLAGMPTSHFVGVDGVQAFLQTYSHEVSLIADSQKSHLIFPQPNYGDTLISQESCEKSEPLLIAEDSAIILGKCDPTSNQQAPPNTDWRFSQAQRPGTSGSQNGDDTGTWPNNQFDTEMLQAMILASASEAADGSSTLGGGAGTMGLSARYGPQFTLQHVPDYRQNVYIPGSNATLTNAAGKRDGKAPAGGNGNKKKSGKKEKK

SEQ ID NO: 121 - protein, 750 aa, Homo sapiens
MANRLQRGDRSRLLLLLCIFLGTLRGFRARQIRYSVPEETEKGSFVGNISKDLGLEPRELAKRGVRIVSRGKTQLFAVNPRSGSLITAGRIDREELCETVSSCFLNMELLVEDTLKIYGVEVEIIDINDNAPSFQEDEVEIKVSEHAIPGARFALPNARDPDVGVNSLQSYQLSPNNYFSLQLRGRTDGAKNPELVLEGSLDREKEAAHLLLLTALDGGDPIRKGAVPIRVVVLDVNDHIPMFTQSVYRVSVPENISSGTRVLMVNATDPDEGINGEVMYSFRNMESKASEIFQLDSQTGEVQVRGSLDFEKYRFYEMEIQGQDGGGLFTTTTMLITVVDVNDNAPEITITSSINSILENSPPGTVIALLNVQDQDSGENGQVSCFIPNHLPFKLEKTYGNYYKLITSRVLDRELVQSYNITLTATDQGSPPLSAETHVWLNVADDNDNPPVFPHSSYSAYIPENNPRGASIFSVTALDPDSKQNALVTYSLTDDTVQGVPLSSYVSINSNTGVLYALQSFDYEQFRDLELRVIARDSGDPPLSSNVSLSLFVLDQNDNAPEILYPALPTDGSTGVELAPRSAEPGYLVTKVVAVDKDSGQNAWLSYRLLKASEPGLFAVGEHTGEQAPPNTDWRFSQAQRPGTSGSQNGDDTGTWPNNQFDTEMLQAMILASASEAADGSSTLGGGAGTMGLSARYGPQFTLQHVPDYRQNVYIPGSNATLTNAAGKRDGKAPAGGNGNKKKSGKKEKK

SEQ ID NO: 122 - protein, 462 aa, Homo sapiens
MASNSSSCPTPGGGHLNGYPVPPYAFFFPPMLGGLSPPGALTTLQHQLPVSGYSTPSPATIETQSSSSEEIVPSPPSPPPLPRIYKPCFVCQDKSSGYHYGVSACEGCKGFFRRSIQKNMVYTCHRDKNCIINKVTRNRCQYCRLQKCFEVGMSKESVRNDRNKKKKEVPKPECSESYTLTPEVGELIEKVRKAHQETFPALCQLGKYTTNNSSEQRVSLDIDLWDKFSELSTKCIIKTVEFAKQLPGFTTLTIADQITLLKAACLDILILRICTRYTPEQDTMTFSDGLTLNRTQMHNAGFGPLTDLVFAFANQLLPLEMDDAETGLLSAICLICGDRQDLEQPDRVDMLQEPLLEALKVYVRKRRPSRPHMFPKMLMKITDLRSISAKGAERVITLKMEIPGSMPPLIQEMLENSEGLDTLSGQPGGGGRDGGGLAPPPGSCSPSLSPSSNRSSPATHSP

SEQ ID NO: 123 - protein, 462 aa, Homo sapiens; identical to SEQ ID NO: 122

SEQ ID NO: 124 - protein, 365 aa, Homo sapiens
MASNSSSCPTPGGGHLNGYPVPPYAFFFPPMLGGLSPPGALTTLQHQLPVSGYSTPSPATVRNDRNKKKKEVPKPECSESYTLTPEVGELIEKVRKAHQETFPALCQLGKYTTNNSSEQRVSLDIDLWDKFSELSTKCIIKTVEFAKQLPGFTTLTIADQITLLKAACLDILILRICTRYTPEQDTMTFSDGLTLNRTQMHNAGFGPLTDLVFAFANQLLPLEMDDAETGLLSAICLICGDRQDLEQPDRVDMLQEPLLEALKVYVRKRRPSRPHMFPKMLMKITDLRSISAKGAERVITLKMEIPGSMPPLIQEMLENSEGLDTLSGQPGGGGRDGGGLAPPPGSCSPSLSPSSNRSSPATHSP

SEQ ID NO: 125 - protein, 457 aa, Homo sapiens
MYESVEVGGPTPNPFLVVDFYNQNRACLLPEKGLPAPGPYSTPLRTPLWNGSNHSIETQSSSSEEIVPSPPSPPPLPRIYKPCFVCQDKSSGYHYGVSACEGCKGFFRRSIQKNMVYTCHRDKNCIINKVTRNRCQYCRLQKCFEVGMSKESVRNDRNKKKKEVPKPECSESYTLTPEVGELIEKVRKAHQETFPALCQLGKYTTNNSSEQRVSLDIDLWDKFSELSTKCIIKTVEFAKQLPGFTTLTIADQITLLKAACLDILILRICTRYTPEQDTMTFSDGLTLNRTQMHNAGFGPLTDLVFAFANQLLPLEMDDAETGLLSAICLICGDRQDLEQPDRVDMLQEPLLEALKVYVRKRRPSRPHMFPKMLMKITDLRSISAKGAERVITLKMEIPGSMPPLIQEMLENSEGLDTLSGQPGGGGRDGGGLAPPPGSCSPSLSPSSNRSSPATHSP

SEQ ID NO: 126 - protein, 1441 aa, Homo sapiens
MATAAAAAAVMAPPGCPGSCPNFAVVCSFLERYGPLLDLPELPFPELERVLQAPPPDVGNGEVPKELVELHLKLMRKIGKSVTADRWEKYLIKICQEFNSTWAWEMEKKGYLEMSVECKLALLKYLCECQFDDNLKFKNIINEEDADTMRLQPIGRDKDGLMYWYQLDQDHNVRMYIEEQDDQDGSSWKCIVRNRNELAETLALLKAQIDPVLLKNSSQQDNSSRESPSLEDEETKKEEETPKQEEQKESEKMKSEEQPMDLENRSTANVLEETTVKKEKEDEKELVKLPVIVKLEKPLPENEEKKIIKEESDSFKENVKPIKVEVKECRADPKDTKSSMEKPVAQEPERIEFGGNIKSSHEITEKSTEETEKLKNDQQAKIPLKKREIKLSDDFDSPVKGPLCKSVTPTKEFLKDEIKQEEETCKRISTITALGHEGKQLVNGEVSDERVAPNFKTEPIETKFYETKEESYSPSKDRNIITEGNGTESLNSVITSMKTGELEKETAPLRKDADSSISVLEIHSQKAQIEEPDPPEMETSLDSSEMAKDLSSKTALSSTESCTMKGEEKSPKTKKDKRPPILECLEKLEKSKKTFLDKDAQRLSPIPEEVPKSTLESEKPGSPEAAETSPPSNIIDHCEKLASEKEVVECQSTSTVGGQSVKKVDLETLKEDSEFTKVEMDNLDNAQTSGIEEPSETKGSMQKSKFKYKLVPEEETTASENTEITSERQKEGIKLTIRISSRKKKPDSPPKVLEPENKQEKTEKEEEKTNVGRTLRRSPRISRPTAKVAEIRDQKADKKRGEGEDEVEEESTALQKTDKKEILKKSEKDTNSKVSKVKPKGKVRWTGSRTRGRWKYSSNDESEGSGSEKSSAASEEEEEKESEEAILADDDEPCKKCGLPNHPELILLCDSCDSGYHTACLRPPLMIIPDGEWFCPPCQHKLLCEKLEEQLQDLDVALKKKERAERRKERLVYVGISIENIIPPQEPDFSEDQEEKKKDSKKSKANLLERRSTRTRKCISYRFDEFDEAIDEAIEDDIKEADGGGVGRGKDISTITGHRGKDISTILDEERKENKRPQRAAAARRKKRRRLNDLDSDSNLDEEESEDEFKISDGSQDEFVVSDENPDESEEDPPSNDDSDTDFCSRRLRRHPSRPMRQSRRLRRKTPKKKYSDDDEEEESEENSRDSESDFSDDFSDDFVETRRRRSRRNQKRQINYKEDSESDGSQKSLRRGKEIRRVHKRRLSSSESEESYLSKNSEDDELAKESKRSVRKRGRSTDEYSEADEEEEEEEGKPSRKRLHRIETDEEESCDNAHGDANQPARDSQPRVLPSEQESTKKPYRIESDEEEDFENVGKVGSPLDYSLVDLPSTNGQSPGKAIENLIGKPTEKSQTPKDNSTASASLASNGTSGGQEAGAPEEEEDELLRVTDLVDYVCNSEQL

SEQ ID NO: 127 - protein, 1285 aa, Homo sapiens
MERRWDLDLTYVTERILAAAFPARPDEQRHRGHLRELAHVLQSKHRDKYLLFNLSEKRHDLTRLNPKVQDFGWPELHAPPLDKLCSICKAMETWLSADPQHVVVLYCKGNKGKLGVIVSAYMHYSKISAGADQALATLTMRKFCEDKVATELQPSQRRYISYFSGLLSGSIRMNSSPLFLHYVLIPMLPAFEPGTGFQPFLKIYQSMQLVYTSGVYHIAGPGPQQLCISLEPALLLKGDVMVTCYHKGGRGTDRTLVFRVQFHTCTIHGPQLTFPKDQLDEAWTDERFPFQASVEFVFSSSPEKIKGSTPRNDPSVSVDYNTTEPAVRWDSYENFNQHHEDSVDGSLTHTRGPLDGSPYAQVQRPPRQTPPAPSPEPPPPPMLSVSSDSGHSSTLTTEPAAESPGRPPPTAAERQELDRLLGGCGVASGGRGAGRETAILDDEEQPTVGGGPHLGVYPGHRPGLSRHCSCRQGYREPCGVPNGGYYRPEGTLERRRLAYGGYEGSPQGYAEASMEKRRLCRSLSEGLYPYPPEMGKPATGDFGYRAPGYREVVILEDPGLPALYPCPACEEKLALPTAALYGLRLEREAGEGWASEAGKPLLHPVRPGHPLPLLLPACGHHHAPMPDYSCLKPPKAGEEGHEGCSYTMCPEGRYGHPGYPALVTYSYGGAVPSYCPAYGRVPHSCGSPGEGRGYPSPGAHSPRAGSISPGSPPYPQSRKLSYEIPTEEGGDRYPLPGHLASAGPLASAESLEPVSWREGPSGHSTLPRSPRDAPCSASSELSGPSTPLHTSSPVQGKESTRRQDTRSPTSAPTQRLSPGEALPPVSQAGTGKAPELPSGSGPEPLAPSPVSPTFPPSSPSDWPQERSPGGHSDGASPRSPVPTTLPGLRHAPWQGPRGPPDSPDGSPLTPVPSQMPWLVASPEPPQSSPTPAFPLAASYDTNGLSQPPLPEKRHLPGPGQQPGPWGPEQASSPARGISHHVTFAPLLSDNVPQTPEPPTQESQSNVKFVQDTSKFWYKPHLSRDQAIALLKDKDPGAFLIRDSHSFQGAYGLALKVATPPPSAQPWKGDPVEQLVRHFLIETGPKGVKIKGCPSEPYFGSLSALVSQHSISPISLPCCLRIPSKDPLEETPEAPVPTNMSTAADLLRQGAACSVLYLTSVETESLTGPQAVARASSAALSCSPRPTPAVVHFKVSAQGITLTDNQRKLFFRRHYPVNSITFSSTDPQDRRWTNPDGTTSKIFGFVAKKPGSPWENVCHLFAELDPDQPAGAIVTFITKVLLGQRK

SEQ ID NO: 128 - protein, 1419 aa, Homo sapiens
MDGGGVCVGRGDLLSSPQALGQLLRKESRPRRAMKPRKAEPHSFREKVFRKKPPVCAVCKVTIDGTGVSCRVCKVATHRKCEAKVTSACQALPPVELRRNTAPVRRIEHLGSTKSLNHSKQRSTLPRSFSLDPLMERRWDLDLTYVTERILAAAFPARPDEQRHRGHLRELAHVLQSKHRDKYLLFNLSEKRHDLTRLNPKVQDFGWPELHAPPLDKLCSICKAMETWLSADPQHVVVLYCKGNKGKLGVIVSAYMHYSKISAGADQALATLTMRKFCEDKVATELQPSQRRYISYFSGLLSGSIRMNSSPLFLHYVLIPMLPAFEPGTGFQPFLKIYQSMQLVYTSGVYHIAGPGPQQLCISLEPALLLKGDVMVTCYHKGGRGTDRTLVFRVQFHTCTIHGPQLTFPKDQLDEAWTDERFPFQASVEFVFSSSPEKIKGSTPRNDPSVSVDYNTTEPAVRWDSYENFNQHHEDSVDGSLTHTRGPLDGSPYAQVQRPPRQTPPAPSPEPPPPPMLSVSSDSGHSSTLTTEPAAESPGRPPPTAAERQELDRLLGGCGVASGGRGAGRETAILDDEEQPTVGGGPHLGVYPGHRPGLSRHCSCRQGYREPCGVPNGGYYRPEGTLERRRLAYGGYEGSPQGYAEASMEKRRLCRSLSEGLYPYPPEMGKPATGDFGYRAPGYREVVILEDPGLPALYPCPACEEKLALPTAALYGLRLEREAGEGWASEAGKPLLHPVRPGHPLPLLLPACGHHHAPMPDYSCLKPPKAGEEGHEGCSYTMCPEGRYGHPGYPALVTYSYGGAVPSYCPAYGRVPHSCGSPGEGRGYPSPGAHSPRAGSISPGSPPYPQSRKLSYEIPTEEGGDRYPLPGHLASAGPLASAESLEPVSWREGPSGHSTLPRSPRDAPCSASSELSGPSTPLHTSSPVQGKESTRRQDTRSPTSAPTQRLSPGEALPPVSQAGTGKAPELPSGSGPEPLAPSPVSPTFPPSSPSDWPQERSPGGHSDGASPRSPVPTTLPGLRHAPWQGPRGPPDSPDGSPLTPVPSQMPWLVASPEPPQSSPTPAFPLAASYDTNGLSQPPLPEKRHLPGPGQQPGPWGPEQASSPARGISHHVTFAPLLSDNVPQTPEPPTQESQSNVKFVQDTSKFWYKPHLSRDQAIALLKDKDPGAFLIRDSHSFQGAYGLALKVATPPPSAQPWKGDPVEQLVRHFLIETGPKGVKIKGCPSEPYFGSLSALVSQHSISPISLPCCLRIPSKDPLEETPEAPVPTNMSTAADLLRQGAACSVLYLTSVETESLTGPQAVARASSAALSCSPRPTPAVVHFKVSAQGITLTDNQRKLFFRRHYPVNSITFSSTDPQDRRWTNPDGTTSKIFGFVAKKPGSPWENVCHLFAELDPDQPAGAIVTFITKVLLGQRK

SEQ ID NO: 129 - protein, 1409 aa, Homo sapiens
MKSSGPVERLLRALGRRDSSRAASRPRKAEPHSFREKVFRKKPPVCAVCKVTIDGTGVSCRVCKVATHRKCEAKVTSACQALPPVELRRNTAPVRRIEHLGSTKSLNHSKQRSTLPRSFSLDPLMERRWDLDLTYVTERILAAAFPARPDEQRHRGHLRELAHVLQSKHRDKYLLFNLSEKRHDLTRLNPKVQDFGWPELHAPPLDKLCSICKAMETWLSADPQHVVVLYCKGNKGKLGVIVSAYMHYSKISAGADQALATLTMRKFCEDKVATELQPSQRRYISYFSGLLSGSIRMNSSPLFLHYVLIPMLPAFEPGTGFQPFLKIYQSMQLVYTSGVYHIAGPGPQQLCISLEPALLLKGDVMVTCYHKGGRGTDRTLVFRVQFHTCTIHGPQLTFPKDQLDEAWTDERFPFQASVEFVFSSSPEKIKGSTPRNDPSVSVDYNTTEPAVRWDSYENFNQHHEDSVDGSLTHTRGPLDGSPYAQVQRPPRQTPPAPSPEPPPPPMLSVSSDSGHSSTLTTEPAAESPGRPPPTAAERQELDRLLGGCGVASGGRGAGRETAILDDEEQPTVGGGPHLGVYPGHRPGLSRHCSCRQGYREPCGVPNGGYYRPEGTLERRRLAYGGYEGSPQGYAEASMEKRRLCRSLSEGLYPYPPEMGKPATGDFGYRAPGYREVVILEDPGLPALYPCPACEEKLALPTAALYGLRLEREAGEGWASEAGKPLLHPVRPGHPLPLLLPACGHHHAPMPDYSCLKPPKAGEEGHEGCSYTMCPEGRYGHPGYPALVTYSYGGAVPSYCPAYGRVPHSCGSPGEGRGYPSPGAHSPRAGSISPGSPPYPQSRKLSYEIPTEEGGDRYPLPGHLASAGPLASAESLEPVSWREGPSGHSTLPRSPRDAPCSASSELSGPSTPLHTSSPVQGKESTRRQDTRSPTSAPTQRLSPGEALPPVSQAGTGKAPELPSGSGPEPLAPSPVSPTFPPSSPSDWPQERSPGGHSDGASPRSPVPTTLPGLRHAPWQGPRGPPDSPDGSPLTPVPSQMPWLVASPEPPQSSPTPAFPLAASYDTNGLSQPPLPEKRHLPGPGQQPGPWGPEQASSPARGISHHVTFAPLLSDNVPQTPEPPTQESQSNVKFVQDTSKFWYKPHLSRDQAIALLKDKDPGAFLIRDSHSFQGAYGLALKVATPPPSAQPWKGDPVEQLVRHFLIETGPKGVKIKGCPSEPYFGSLSALVSQHSISPISLPCCLRIPSKDPLEETPEAPVPTNMSTAADLLRQGAACSVLYLTSVETESLTGPQAVARASSAALSCSPRPTPAVVHFKVSAQGITLTDNQRKLFFRRHYPVNSITFSSTDPQDRRWTNPDGTTSKIFGFVAKKPGSPWENVCHLFAELDPDQPAGAIVTFITKVLLGQRK

SEQ ID NO: 130 - protein, 914 aa, Homo sapiens
MSQSQNAIFTSPTGEENLMNSNHRDSESITDVCSNEDLPEVELVSLLEEQLPQYRLKVDTLFLYENQDWTQSPHQRQHASDALSPVLAEETFRYMILGTDRVEQMTKTYNDIDMVTHLLAERDRDLELAARIGQALLKRNHVLSEQNESLEEQLGQAFDQVNQLQHELCKKDELLRIVSIASEESETDSSCSTPLRFNESFSLSQGLLQLEMLQEKLKELEEENMALRSKACHIKTETVTYEEKEQQLVSDCVKELRETNAQMSRMTEELSGKSDELIRYQEELSSLLSQIVDLQHKLKEHVIEKEELKLHLQASKDAQRQLTMELHELQDRNMECLGMLHESQEEIKELRSRSGPTAHLYFSQSYGAFTGESLAAEIEGTMRKKLSLDEESSLFKQKAQQKRVFDTVRIANDTRGRSISFPALLPIPGSNRSSVIMTAKPFESGLQQTEDKSLLNQGSSSEEVAGSSQKMGQPGPSGDSDLATALHRLSLRRQNYLSEKQFFAEEWQRKIQVLADQKEGVSGCVTPTESLASLCTTQSEITDLSSASCLRGFMPEKLQIVKPLEGSQTLYHWQQLAQPNLGTILDPRPGVITKGFTQLPGDAIYHISDLEEDEEEGITFQVQQPLEVEEKLSTSKPVTGIFLPPITSAGGPVTVATANPGKCLSCTNSTFTFTTCRILHPSDITQVTPSSGFPSLSCGSSGSSSSNTAVNSPALSYRLSIGESITNRRDSTTTFSSTMSLAKLLQERGISAKVYHSPISENPLQPLPKSLAIPSTPPNSPSHSPCPSPLPFEPRVHLSENFLASRPAETFLQEMYGLRPSRNPPDVGQLKMNLVDRLKRLGIARVVKNPGAQENGRCQEAEIGPQKPDSAVYLNSGSSLLGGLRRNQSLPVIMGSFAAPVCTSSPKMGVLKED

SEQ ID NO: 131 - protein, 94 aa, Homo sapiens
MRTIAILAAILLVALQAQAESLQERADEATTQKQSGEDNQDLAISFAGNGLSALRTSGSQARATCYCRTGRCATRESLSGVCEISGRLYRLCCR

SEQ ID NO: 132 - protein, 504 aa, Homo sapiens
MVAPGSVTSRLGSVFPFLLVLVDLQYEGAECGVNADVEKHLELGKKLLAAGQLADALSQFHAAVDGDPDNYIAYYRRATVFLAMGKSKAALPDLTKVIQLKMDFTAARLQRGHLLLKQGKLDEAEDDFKKVLKSNPSENEEKEAQSQLIKSDEMQRLRSQALNAFGSGDYTAAIAFLDKILEVCVWDAELRELRAECFIKEGEPRKAISDLKAASKLKNDNTEAFYKISTLYYQLGDHELSLSEVRECLKLDQDHKRCFAHYKQVKKLNKLIESAEELIRDGRYTDATSKYESVMKTEPSIAEYTVRSKERICHCFSKDEKPVEAIRVCSEVLQMEPDNVNALKDRAEAYLIEEMYDEAIQDYETAQEHNENDQQIREGLEKAQRLLKQSQKRDYYKILGVKRNAKKQEIIKAYRKLALQWHPDNFQNEEEKKKAEKKFIDIAAAKEVLSDPEMRKKFDDGEDPLDAESQQGGGGNPFHRSWNSWQGFNPFSSGGPFRFKFHFN

SEQ ID NO: 133 - protein, 762 aa, Homo sapiens
MNEAKVKETLRRCGASGDECGRLQYALTCLRKVTGLGGEHKEDSSWSSLDARRESGSGPSTDTLSAASLPWPPGSSQLGRAGNSAQGPRSISVSALPASDSPTPSFSEGLSDTCIPLHASGRLTPRALHSFITPPTTPQLRRHTKLKPPRTPPPPSRKVFQLLPSFPTLTRSKSHESQLGNRIDDVSSMRFDLSHGSPQMVRRDIGLSVTHRFSTKSWLSQVCHVCQKSMIFGVKCKHCRLKCHNKCTKEAPACRISFLPLTRLRRTESVPSDINNPVDRAAEPHFGTLPKALTKKEHPPAMNHLDSSSNPSSTTSSTPSSPAPFPTSSNPSSATTPPNPSPGQRDSRFNFPAAYFIHHRQQFIFPVPSAGHCWKCLLIAESLKENAFNISAFAHAAPLPEAADGTRLDDQPKADVLEAHEAEAEEPEAGKSEAEDDEDEVDDLPSSRRPWRGPISRKASQTSVYLQEWDIPFEQVELGEPIGQGRWGRVHRGRWHGEVAIRLLEMDGHNQDHLKLFKKEVMNYRQTRHENVVLFMGACMNPPHLAIITSFCKGRTLHSFVRDPKTSLDINKTRQIAQEIIKGMGYLHAKGIVHKDLKSKNVFYDNGKVVITDFGLFGISGVVREGRRENQLKLSHDWLCYLAPEIVREMTPGKDEDQLPFSKAADVYAFGTVWYELQARDWPLKNQAAEASIWQIGSGEGMKRVLTSVSLGKEVSEILSACWAFDLQERPSFSLLMDMLEKLPKLNRRLSHPGHFWKSAEL

SEQ ID NO: 134 - protein, 959 aa, Homo sapiens
MAASTGYVRLWGAARCWVLRRPMLAAAGGRVPTAAGAWLLRGQRTCDASPPWALWGRGPAIGGQWRGFWEASSRGGGAFSGGEDASEGGAEEGAGGAGGSAGAGEGPVITALTPMTIPDVFPHLPLIAITRNPVFPRFIKIIEVKNKKLVELLRRKVRLAQPYVGVFLKRDDSNESDVVESLDEIYHTGTFAQIHEMQDLGDKLRMIVMGHRRVHISRQLEVEPEEPEAENKHKPRRKSKRGKKEAEDELSARHPAELAMEPTPELPAEVLMVEVENVVHEDFQVTEEVKALTAEIVKTIRDIIALNPLYRESVLQMMQAGQRVVDNPIYLSDMGAALTGAESHELQDVLEETNIPKRLYKALSLLKKEFELSKLQQRLGREVEEKIKQTHRKYLLQEQLKIIKKELGLEKDDKDAIEEKFRERLKELVVPKHVMDVVDEELSKLGLLDNHSSEFNVTRNYLDWLTSIPWGKYSNENLDLARAQAVLEEDHYGMEDVKKRILEFIAVSQLRGSTQGKILCFYGPPGVGKTSIARSIARALNREYFRFSVGGMTDVAEIKGHRRTYVGAMPGKIIQCLKKTKTENPLILIDEVDKIGRGYQGDPSSALLELLDPEQNANFLDHYLDVPVDLSKVLFICTANVTDTIPEPLRDRMEMINVSGYVAQEKLAIAERYLVPQARALCGLDESKAKLSSDVLTLLIKQYCRESGVRNLQKQVEKVLRKSAYKIVSGEAESVEVTPENLQDFVGKPVFTVERMYDVTPPGVVMGLAWTAMGGSTLFVETSLRRPQDKDAKGDKDGSLEVTGQLGEVMKESARIAYTFARAFLMQHAPANDYLVTSHIHLHVPEGATPKDGPSAGCTIVTALLSLAMGRPVRQNLAMTGEVSLTGKILPVGGIKEKTIAAKRAGVTCIVLPAENKKDFYDLAAFITEGLEVHFVEHYREIFDIAFPDEQAEALAVER

SEQ ID NO: 135 - protein, 979 aa, Homo sapiens
MGTRLPLVLRQLRRPPQPPGPPRRLRVPCRASSGGGGGGGGGREGLLGQRRPQDGQARSSCSPGGRTPAARDSIVREVIQNSKEVLSLLQEKNPAFKPVLAIIQAGDDNLMQEINQNLAEEAGLNITHICLPPDSSEAEIIDEILKINEDTRVHGLALQISENLFSNKVLNALKPEKDVDGVTDINLGKLVRGDAHECFVSPVAKAVIELLEKSVGVNLDGKKILVVGAHGSLEAALQCLFQRKGSMTMSIQWKTRQLQSKLHEADIVVLGSPKPEEIPLTWIQPGTTVLNCSHDFLSGKVGCGSPRIHFGGLIEEDDVILLAAALRIQNMVSSGRRWLREQQHRRWRLHCLKLQPLSPVPSDIEISRGQTPKAVDVLAKEIGLLADEIEIYGKSKAKVRLSVLERLKDQADGKYVLVAGITPTPLGEGKSTVTIGLVQALTAHLNVNSFACLRQPSQGPTFGVKGGAAGGGYAQVIPMEEFNLHLTGDIHAITAANNLLAAAIDTRILHENTQTDKALYNRLVPLVNGVREFSEIQLARLKKLGINKTDPSTLTEEEVSKFARLDIDPSTITWQRVLDTNDRFLRKITIGQGNTEKGHYRQAQFDIAVASEIMAVLALTDSLADMKARLGRMVVASDKSGQPVTADDLGVTGALTVLMKDAIKPNLMQTLEGTPVFVHAGPFANIAHGNSSVLADKIALKLVGEEGFVVTEAGFGADIGMEKFFNIKCRASGLVPNVVVLVATVRALKMHGGGPSVTAGVPLKKEYTEENIQLVADGCCNLQKQIQITQLFGVPVVVALNVFKTDTRAEIDLVCELAKRAGAFDAVPCYHWSVGGKGSVDLARAVREAASKRSRFQFLYDVQVPIVDKIRTIAQAVYGAKDIELSPEAQAKIDRYTQQGFGNLPICMAKTHLSLSHQPDKKGVPRDFILPISDVRASIGAGFIYPLVGTMSTMPGLPTRPCFYDIDLDTETEQVKGLF

SEQ ID NO: 136 - protein, 978 aa, Homo sapiens
MGTRLPLVLRQLRRPPQPPGPPRRLRVPCRASSGGGGGGGGGREGLLGQRRPQDGQARSSCSPGGRTPAARDSIVREVIQNSKEVLSLLQEKNPAFKPVLAIIQAGDDNLMQEINQNLAEEAGLNITHICLPPDSSEAEIIDEILKINEDTRVHGLALQISENLFSNKVLNALKPEKDVDGVTDINLGKLVRGDAHECFVSPVAKAVIELLEKSGVNLDGKKILVVGAHGSLEAALQCLFQRKGSMTMSIQWKTRQLQSKLHEADIVVLGSPKPEEIPLTWIQPGTTVLNCSHDFLSGKVGCGSPRIHFGGLIEEDDVILLAAALRIQNMVSSGRRWLREQQHRRWRLHCLKLQPLSPVPSDIEISRGQTPKAVDVLAKEIGLLADEIEIYGKSKAKVRLSVLERLKDQADGKYVLVAGITPTPLGEGKSTVTIGLVQALTAHLNVNSFACLRQPSQGPTFGVKGGAAGGGYAQVIPMEEFNLHLTGDIHAITAANNLLAAAIDTRILHENTQTDKALYNRLVPLVNGVREFSEIQLARLKKLGINKTDPSTLTEEEVSKFARLDIDPSTITWQRVLDTNDRFLRKITIGQGNTEKGHYRQAQFDIAVASEIMAVLALTDSLADMKARLGRMVVASDKSGQPVTADDLGVTGALTVLMKDAIKPNLMQTLEGTPVFVHAGPFANIAHGNSSVLADKIALKLVGEEGFVVTEAGFGADIGMEKFFNIKCRASGLVPNVVVLVATVRALKMHGGGPSVTAGVPLKKEYTEENIQLVADGCCNLQKQIQITQLFGVPVVVALNVFKTDTRAEIDLVCELAKRAGAFDAVPCYHWSVGGKGSVDLARAVREAASKRSRFQFLYDVQVPIVDKIRTIAQAVYGAKDIELSPEAQAKIDRYTQQGFGNLPICMAKTHLSLSHQPDKKGVPRDFILPISDVRASIGAGFIYPLVGTMSTMPGLPTRPCFYDIDLDTETEQVKGLF

SEQ ID NO: 137 - protein, 275 aa, Homo sapiens
MGTRLPLVLRQLRRPPQPPGPPRRLRVPCRASSGGGGGGGGGREGLLGQRRPQDGQARSSCSPGGRTPAARDSIVREVIQNSKEVLSLLQEKNPAFKPVLAIIQAGDDNLMQEINQNLAEEAGLNITHICLPPDSSEAEIIDEILKINEDTRVHGLALQISENLFSNKVLNALKPEKDVDGVTDINLGKLVRGDAHECFVSPVAKAVIELLEKSGVNLDGKKILVVGAHGSLEAALQCLFQRKGSMTMSIQWKTRQLQSKTESRSVTRLECRRVI

SEQ ID NO: 138 - protein, 913 aa, Homo sapiens
MQSRRARPRREVIQNSKEVLSLLQEKNPAFKPVLAIIQAGDDNLMQEINQNLAEEAGLNITHICLPPDSSEAEIIDEILKINEDTRVHGLALQISENLFSNKVLNALKPEKDVDGVTDINLGKLVRGDAHECFVSPVAKAVIELLEKSVGVNLDGKKILVVGAHGSLEAALQCLFQRKGSMTMSIQWKTRQLQSKLHEADIVVLGSPKPEEIPLTWIQPGTTVLNCSHDFLSGKVGCGSPRIHFGGLIEEDDVILLAAALRIQNMVSSGRRWLREQQHRRWRLHCLKLQPLSPVPSDIEISRGQTPKAVDVLAKEIGLLADEIEIYGKSKAKVRLSVLERLKDQADGKYVLVAGITPTPLGEGKSTVTIGLVQALTAHLNVNSFACLRQPSQGPTFGVKGGAAGGGYAQVIPMEEFNLHLTGDIHAITAANNLLAAAIDTRILHENTQTDKALYNRLVPLVNGVREFSEIQLARLKKLGINKTDPSTLTEEEVSKFARLDIDPSTITWQRVLDTNDRFLRKITIGQGNTEKGHYRQAQFDIAVASEIMAVLALTDSLADMKARLGRMVVASDKSGQPVTADDLGVTGALTVLMKDAIKPNLMQTLEGTPVFVHAGPFANIAHGNSSVLADKIALKLVGEEGFVVTEAGFGADIGMEKFFNIKCRASGLVPNVVVLVATVRALKMHGGGPSVTAGVPLKKEYTEENIQLVADGCCNLQKQIQITQLFGVPVVVALNVFKTDTRAEIDLVCELAKRAGAFDAVPCYHWSVGGKGSVDLARAVREAASKRSRFQFLYDVQVPIVDKIRTIAQAVYGAKDIELSPEAQAKIDRYTQQGFGNLPICMAKTHLSLSHQPDKKGVPRDFILPISDVRASIGAGFIYPLVGTMSTMPGLPTRPCFYDIDLDTETEQVKGLF

SEQ ID NO: 139 - protein, 2697 aa, Homo sapiens
MNGDMPHVPITTLAGIASLTDLLNQLPLPSPLPATTTKSLLFNARIAEEVNCLLACRDDNLVSQLVHSLNQVSTDHIELKDNLGSDDPEGDIPVLLQAVLARSPNVFREKSMQNRYVQSGMMMSQYKLSQNSMHSSPASSNYQQTTISHSPSSRFVPPQTSSGNRFMPQQNSPVPSPYAPQSPAGYMPYSHPSSYTTHPQMQQASVSSPIVAGGLRNIHDNKVSGPLSGNSANHHADNPRHGSSEDYLHMVHRLSSDDGDSSTMRNAASFPLRSPQPVCSPAGSEGTPKGSRPPLILQSQSLPCSSPRDVPPDILLDSPERKQKKQKKMKLGKDEKEQSEKAAMYDIISSPSKDSTKLTLRLSRVRSSDMDQQEDMISGVENSNVSENDIPFNVQYPGQTSKTPITPQDINRPLNAAQCLSQQEQTAFLPANQVPVLQQNTSVAAKQPQTSVVQNQQQISQQGPIYDEVELDALAEIERIERESAIERERFSKEVQDKDKPLKKRKQDSYPQEAGGATGGNRPASQETGSTGNGSRPALMVSIDLHQAGRVDSQASITQDSDSIKKPEEIKQCNDAPVSVLQEDIVGSLKSTPENHPETPKKKSDPELSKSEMKQSESRLAESKPNENRLVETKSSENKLETKVETQTEELKQNESRTTECKQNESTIVEPKQNENRLSDTKPNDNKQNNGRSETTKSRPETPKQKGESRPETPKQKSDGHPETPKQKGDGRPETPKQKGESRPETPKQKNEGRPETPKHRHDNRRDSGKPSTEKKPEVSKHKQDTKSDSPRLKSERAEALKQRPDGRSVSESLRRDHDNKQKSDDRGESERHRGDQSRVRRPETLRSSSRNEHGIKSDSSKTDKLERKHRHESGDSRERPSSGEQKSRPDSPRVKQGDSNKSRSDKLGFKSPTSKDDKRTEGNKSKVDTNKAHPDNKAEFPSYLLGGRSGALKNFVIPKIKRDKDGNVTQETKKMEMKGEPKDKVEKIGLVEDLNKGAKPVVVLQKLSLDDVQKLIKDREDKSRSSLKPIKNKPSKSNKGSIDQSVLKELPPELLAEIESTMPLCERVKMNKRKRSTVNEKPKYAEISSDEDNDSDEAFESSRKRHKKDDDKAWEYEERDRRSSGDHRRSGHSHEGRRSSGGGRYRNRSPSDSDMEDYSPPPSLSEVARKMKKKEKQKKRKAYEPKLTPEEMMDSSTFKRFTASIENILDNLEDMDFTAFGDDDEIPQELLLGKHQLNELGSESAKIKAMGIMDKLSTDKTVKVLNILEKNIQDGSKLSTLLNHNNDTEEEERLWRDLIMERVTKSADACLTTINIMTSPNMPKAVYIEDVIERVIQYTKFHLQNTLYPQYDPVYRLDPHGGGLLSSKAKRAKCSTHKQRVIVMLYNKVCDIVSSLSELLEIQLLTDTTILQVSSMGITPFFVENVSELQLCAIKLVTAVFSRYEKHRQLILEEIFTSLARLPTSKRSLRNFRLNSSDMDGEPMYIQMVTALVLQLIQCVVHLPSSEKDSNAEEDSNKKIDQDVVITNSYETAMRTAQNFLSIFLKKCGSKQGEEDYRPLFENFVQDLLSTVNKPEWPAAELLLSLLGRLLVHQFSNKSTEMALRVASLDYLGTVAARLRKDAVTSKMDQGSIERILKQVSGGEDEIQQLQKALLDYLDENTETDPSLVFSRKFYIAQWFRDTTLETEKAMKSQKDEESSEGTHHAKEIETTGQIMHRAENRKKFLRSIIKTTPSQFSTLKMNSDTVDYDDACLIVRYLASMRPFAQSFDIYLTQILRVLGENAIAVRTKAMKCLSEVVAVDPSILARLDMQRGVHGRLMDNSTSVREAAVELLGRFVLCRPQLAEQYYDMLIERILDTGISVRKRVIKILRDICIEQPTFPKITEMCVKMIRRVNDEEGIKKLVNETFQKLWFTPTPHNDKEAMTRKILNITDVVAACRDTGYDWFEQLLQNLLKSEEDSSYKPVKKACTQLVDNLVEHILKYEESLADSDNKGVNSGRLVACITTLFLFSKIRPQLMVKHAMTMQPYLTTKCSTQNDFMVICNVAKILELVVPLMEHPSETFLATIEEDLMKLIIKYGMTVVQHCVSCLGAVVNKVTQNFKFVWACFNRYYGAISKLKSQHQEDPNNTSLLTNKPALLRSLFTVGALCRHFDFDLEDFKGNSKVNIKDKVLELLMYFTKHSDEEVQTKAIIGLGFAFIQHPSLMFEQEVKNLYNNILSDKNSSVNLKIQVLKNLQTYLQEEDTRMQQADRDWKKVAKQEDLKEMGDVSSGMSSSIMQLYLKQVLEAFFHTQSSVRHFALNVIALTLNQGLIHPVQCVPYLIAMGTDPEPAMRNKADQQLVEIDKKYAGFIHMKAVAGMKMSYQVQQAINTCLKDPVRGFRQDESSSALCSHLYSMIRGNRQHRRAFLISLLNLFDDTAKTDVTMLLYIADNLACFPYQTQEEPLFIMHHIDITLSVSGSNLLQSFKESMVKDKRKERKSSPSKENESSDSEEEVSRPRKSRKRVDSDSDSDSEDDINSVMKCLPENSAPLIEFANVSQGILLLLMLKQHLKNLCGFSDSKIQKYSPSESAKVYDKAINRKTGVHFHPKQTLDFLRSDMANSKITEEVKRSIVKQYLDFKLLMEHLDPDEEEEEGEVSASTNARNKAITSLLGGGSPKNNTAAETEDDESDGEDRGGGTSGVRRRRSQRISQRIT

SEQ ID NO: 140 - protein, 2804 aa, Homo sapiens
MNGDMPHVPITTLAGIASLTDLLNQLPLPSPLPATTTKSLLFNARIAEEVNCLLACRDDNLVSQLVHSLNQVSTDHIELKDNLGSDDPEGDIPVLLQAVLARSPNVFREKSMQNRYVQSGMMMSQYKLSQNSMHSSPASSNYQQTTISHSPSSRFVPPQTSSGNRFMPQQNSPVPSPYAPQSPAGYMPYSHPSSYTTHPQMQQASVSSPIVAGGLRNIHDNKVSGPLSGNSANHHADNPRHGSSEDYLHMVHRLSSDDGDSSTMRNAASFPLRSPQPVCSPAGSEGTPKGSRPPLILQSQSLPCSSPRDVPPDILLDSPERKQKKQKKMKLGKDEKEQSEKAAMYDIISSPSKDSTKLTLRLSRVRSSDMDQQEDMISGVENSNVSENDIPFNVQYPGQTSKTPITPQDINRPLNAAQCLSQQEQTAFLPANQVPVLQQNTSVAAKQPQTSVVQNQQQISQQGPIYDEVELDALAEIERIERESAIERERFSKEVQDKDKPLKKRKQDSYPQEAGGATGGNRPASQETGSTGNGSRPALMVSIDLHQAGRVDSQASITQDSDSIKKPEEIKQCNDAPVSVLQEDIVGSLKSTPENHPETPKKKSDPELSKSEMKQSESRLAESKPNENRLVETKSSENKLETKVETQTEELKQNESRTTECKQNESTIVEPKQNENRLSDTKPNDNKQNNGRSETTKSRPETPKQKGESRPETPKQKSDGHPETPKQKGDGRPETPKQKGESRPETPKQKNEGRPETPKHRHDNRRDSGKPSTEKKPEVSKHKQDTKSDSPRLKSERAEALKQRPDGRSVSESLRRDHDNKQKSDDRGESERHRGDQSRVRRPETLRSSSRNEHGIKSDSSKTDKLERKHRHESGDSRERPSSGEQKSRPDSPRVKQGDSNKSRSDKLGFKSPTSKDDKRTEGNKSKVDTNKAHPDNKAEFPSYLLGGRSGALKNFVIPKIKRDKDGNVTQETKKMEMKGEPKDKVEKIGLVEDLNKGAKPVVVLQKLSLDDVQKLIKDREDKSRSSLKPIKNKPSKSNKGSIDQSVLKELPPELLAEIESTMPLCERVKMNKRKRSTVNEKPKYAEISSDEDNDSDEAFESSRKRHKKDDDKAWEYEERDRRSSGDHRRSGHSHEGRRSSGGGRYRNRSPSDSDMEDYSPPPSLSEVARKMKKKEKQKKRKAYEPKLTPEEMMDSSTFKRFTASIENILDNLEDMDFTAFGDDDEIPQELLLGKHQLNELGSESAKIKAMGIMDKLSTDKTVKVLNILEKNIQDGSKLSTLLNHNNDTEEEERLWRDLIMERVTKSADACLTTINIMTSPNMPKAVYIEDVIERVIQYTKFHLQNTLYPQYDPVYRLDPHGGGLLSSKAKRAKCSTHKQRVIVMLYNKVCDIVSSLSELLEIQLLTDTTILQVSSMGITPFFVENVSELQLCAIKLVTAVFSRYEKHRQLILEEIFTSLARLPTSKRSLRNFRLNSSDMDGEPMYIQMVTALVLQLIQCVVHLPSSEKDSNAEEDSNKKIDQDVVITNSYETAMRTAQNFLSIFLKKCGSKQGEEDYRPLFENFVQDLLSTVNKPEWPAAELLLSLLGRLLVHQFSNKSTEMALRVASLDYLGTVAARLRKDAVTSKMDQGSIERILKQVSGGEDEIQQLQKALLDYLDENTETDPSLVFSRKFYIAQWFRDTTLETEKAMKSQKDEESSEGTHHAKEIETTGQIMHRAENRKKFLRSIIKTTPSQFSTLKMNSDTVDYDDACLIVRYLASMRPFAQSFDIYLTQILRVLGENAIAVRTKAMKCLSEVVAVDPSILARLDMQRGVHGRLMDNSTSVREAAVELLGRFVLCRPQLAEQYYDMLIERILDTGISVRKRVIKILRDICIEQPTFPKITEMCVKMIRRVNDEEGIKKLVNETFQKLWFTPTPHNDKEAMTRKILNITDVVAACRDTGYDWFEQLLQNLLKSEEDSSYKPVKKACTQLVDNLVEHILKYEESLADSDNKGVNSGRLVACITTLFLFSKIRPQLMVKHAMTMQPYLTTKCSTQNDFMVICNVAKILELVVPLMEHPSETFLATIEEDLMKLIIKYGMTVVQHCVSCLGAVVNKVTQNFKFVWACFNRYYGAISKLKSQHQEDPNNTSLLTNKPALLRSLFTVGALCRHFDFDLEDFKGNSKVNIKDKVLELLMYFTKHSDEEVQTKAIIGLGFAFIQHPSLMFEQEVKNLYNNILSDKNSSVNLKIQVLKNLQTYLQEEDTRMQQADRDWKKVAKQEDLKEMGDVSSGMSSSIMQLYLKQVLEAFFHTQSSVRHFALNVIALTLNQGLIHPVQCVPYLIAMGTDPEPAMRNKADQQLVEIDKKYAGFIHMKAVAGMKMSYQVQQAINTCLKDPVRGFRQDESSSALCSHLYSMIRGNRQHRRAFLISLLNLFDDTAKTDVTMLLYIADNLACFPYQTQEEPLFIMHHIDITLSVSGSNLLQSFKESMVKDKRKERKSSPSKENESSDSEEEVSRPRKSRKRVDSDSDSDSEDDINSVMKCLPENSAPLIEFANVSQGILLLLMLKQHLKNLCGFSDSKIQKYSPSESAKVYDKAINRKTGVHFHPKQTLDFLRSDMANSKITEEVKRSIVKQYLDFKLLMEHLDPDEEEEEGEVSASTNARNKAITSLLGGGSPKNNTAAETEDDESDGEDRGGGTSGSLRRSKRNSDSTELAAQMNESVDVMDVIAICCPKYKDRPQIARVVQKTSSGFSVQWMAGSYSGSWTEAKRRDGRKLVPWVDTIKESDIIYKKIALTSANKLTNKVVQTLRSLYAAKDGTSS

SEQ ID NO: 141 - protein, 379 aa, Homo sapiens
MEMAEAELHKERLQAIAEKRKRQTEIEGKRQQLDEQILLLQHSKSKVLREKWLLQGIPAGTAEEEEARRRQSEEDEFRVKQLEDNIQRLEQEIQTLESEESQISAKEQIILEKLKETEKSFKDFQKGFSSTDGAVYAMEINVEKDKQTGETKILSTSTIGPEGVHQKGVKVYDDGTKVVYEVRSGGTVVENGVHKLSTKDVEELIQKAGQSSLGGGHVSERTVIADGSLSHPKEHMLCKEAKLEMVHKSRKDHSSGNPGQQAQAPSAAGPEANLDQPVTMIFMGYQNIEDEEETKKVLGYDETIKAELVLIDEDDEKSLREKTVTDVSTIDGNAAELVSGRPVSDTTEPSSPEGKEESLATEPAPGTQKKKRCQCCVVM

SEQ ID NO: 142 - protein, 411 aa, Homo sapiens
MAEAELHKERLQAIAEKRKRQTEIEGKRQQLDEQILLLQHSKSKVLREKWLLQGIPAGTAEEEEARRRQSEEDEFRVKQLEDNIQRLEQEIQTLESEESQISAKEQIILEKLKETEKSFKDFQKGFSSTDGDAVNYISSQLPDLPILCSRTAEPSPGQDGTSRAAAVYAMEINVEKDKQTGETKILSTSTIGPEGVHQKGVKVYDDGTKVVYEVRSGGTVVENGVHKLSTKDVEELIQKAGQSSLGGGHVSERTVIADGSLSHPKEHMLCKEAKLEMVHKSRKDHSSGNPGQQAQAPSAAGPEANLDQPVTMIFMGYQNIEDEEETKKVLGYDETIKAELVLIDEDDEKSLREKTVTDVSTIDGNAAELVSGRPVSDTTEPSSPEGKEESLATEPAPGTQKKKRCQCCVVM

SEQ ID NO: 143 - protein, 191 aa, Homo sapiens
MGKQNSKLAPEVMEDLVKSTEFNEHELKQWYKGFLKDCPSGRLNLEEFQQLYVKFFPYGDASKFAQHAFRTFDKNGDGTIDFREFICALSITSRGSFEQKLNWAFNMYDLDGDGKITRVEMLEIIEAIYKMVGTVIMMKMNEDGLTPEQRVDKIFSKMDKNKDDQITLDEFKEAAKSDPSIVLLLQCDIQK

SEQ ID NO: 144 - protein, 1192 aa, Homo sapiens
MPRRAGSGQLPLPRGWEEARDYDGKVFYIDHNTRRTSWIDPRDRLTKPLSFADCVGDELPWGWEAGFDPQIGVYYIDHINKTTQIEDPRKQWRGEQEKMLKDYLSVAQDALRTQKELYHVKEQRLALALDEYVRLNDAYKEKSSSHTSLFSGSSSSTKYDPDILKAEISTTRLRVKKLKRELSQMKQELLYKEQGFETLQQIDKKMSGGQSGYELSEAKAILTELKSIRKAISSGEKEKQDLMQSLAKLQERFHLDQNIGRSEPDLRCSPVNSHLCLSRQTLDAGSQTSISGDIGVRSRSNLAEKVRLSLQYEEAKRSMANLKIELSKLDSEAWPGALDIEKEKLMLINEKEELLKELQFVTPQKRTQDELERLEAERQRLEEELLSVRGTPSRALAERLRLEERRKELLQKLEETTKLTTYLHSQLKSLSASTLSMSSGSSLGSLASSRGSLNTSSRGSLNSLSSTELYYSSQSDQIDVDYQYKLDFLLQEKSGYIPSGPITTIHENEVVKSPSQPGQSGLCGVAAAATGHTPPLAEAPKSVASLSSRSSLSSLSPPGSPLVLEGTFPMSSSHDASLHQFTADFEDCELSSHFADISLIENQILLDSDSGGASQSLSEDKDLNECAREPLYEGTADVEKSLPKRRVIHLLGEKTTCVSAAVSDESVAGDSGVYEAFVKQPSEMEDVTYSEEDVAIVETAQVQIGLRYNAKSSSFMVIIAQLRNLHAFLIPHTSKVYFRVAVLPSSTDVSCLFRTKVHPPTESILFNDVFRVAISQTALQQKTLRVDLCSVSKHRREECLAGTQISLADLPFSSEVFTLWYNLLPSKQMPCKKNEENEDSVFQPNQPLVDSIDLDAVSALLARTSAELLAVEQELAQEEEEESGQEEPRGPDGDWLTMLREASDEIVAEKEAEVKLPEDSSCTEDLSSCTSVPEMNEDGNRKESNCAKDLRSQPPTRIPTLVDKETNTDEAANDNMAVRPKERSSLSSRQHPFVRSSVIVRSQTFSPGERNQYICRLNRSDSDSSTLAKKSLFVRNSTERRSLRVKRTVCQSVLRRTTQECPVRTSLDLELDLQASLTRQSRLNDELQALRDLRQKLEELKAQGETDLPPGVLEDERFQRLLKQAEKQAEQSKEEQKQGLNAEKLMRQVSKDVCRLREQSQKVPRQVQSFREKIAYFTRAKISIPSLPADDV

SEQ ID NO: 145 - protein, 650 aa, Homo sapiens
MASNMDREMILADFQACTGIENIDEAITLLEQNNWDLVAAINGVIPQENGILQSEYGGETIPGPAFNPASHPASAPTSSSSSAFRPVMPSRQIVERQPRMLDFRVEYRDRNVDVVLEDTCTVGEIKQILENELQIPVSKMLLKGWKTGDVEDSTVLKSLHLPKNNSLYVLTPDLPPPSSSSHAGALQESLNQNFMLIITHREVQREYNLNFSGSSTIQEVKRNVYDLTSIPVRHQLWEGWPTSATDDSMCLAESGLSYPCHRLTVGRRSSPAQTREQSEEQITDVHMVSDSDGDDFEDATEFGVDDGEVFGMASSALRKSPMMPENAENEGDALLQFTAEFSSRYGDCHPVFFIGSLEAAFQEAFYVKARDRKLLAIYLHHDESVLTNVFCSQMLCAESIVSYLSQNFITWAWDLTKDSNRARFLTMCNRHFGSVVAQTIRTQKTDQFPLFLIIMGKRSSNEVLNVIQGNTTVDELMMRLMAAMEIFTAQQQEDIKDEDEREARENVKREQDEAYRLSLEADRAKREAHEREMAEQFRLEQIRKEQEEEREAIRLSLEQALPPEPKEENAEPVSKLRIRTPSGEFLERRFLASNKLQIVFDFVASKGFPWDEYKLLSTFPRRDVTQLDPNKSLLEVKLFPQETLFLEAKE

SEQ ID NO: 146 - protein, 403 aa, Homo sapiens
MFRAQWMFELAPGVSSSNLENRPCRAARGSLQKTSADTKGKQEQAKEEKARELFLKAVEEEQNGALYEAIKFYRRAMQLVPDIEFKITYTRSPDGDGVGNSYIEDNDDDSKMADLLSYFQQQLTFQESVLKLCQPELESSQIHISVLPMEVLMYIFRWVVSSDLDLRSLEQLSLVCRGFYICARDPEIWRLACLKVWGRSCIKLVPYTSWREMFLERPRVRFDGVYISKTTYIRQGEQSLDGFYRAWHQVEYYRYIRFFPDGHVMMLTTPEEPQSIVPRLRTRNTRTDAILLGHYRLSQDTDNQTKVFAVITKKKEEKPLDYKYRYFRRVPVQEADQSFHVGLQLCSSGHQRFNKLIWIHHSCHITYKSTGETAVSAFEIDKMYTPLFFARVRSYTAFSERPL

SEQ ID NO: 147 - protein, 437 aa, Homo sapiens
MAEAEEDCHSDTVRADDDEENESPAETDLQAQLQMFRAQWMFELAPGVSSSNLENRPCRAARGSLQKTSADTKGKQEQAKEEKARELFLKAVEEEQNGALYEAIKFYRRAMQLVPDIEFKITYTRSPDGDGVGNSYIEDNDDDSKMADLLSYFQQQLTFQESVLKLCQPELESSQIHISVLPMEVLMYIFRWVVSSDLDLRSLEQLSLVCRGFYICARDPEIWRLACLKVWGRSCIKLVPYTSWREMFLERPRVRFDGVYISKTTYIRQGEQSLDGFYRAWHQVEYYRYIRFFPDGHVMMLTTPEEPQSIVPRLRTRNTRTDAILLGHYRLSQDTDNQTKVFAVITKKKEEKPLDYKYRYFRRVPVQEADQSFHVGLQLCSSGHQRFNKLIWIHHSCHITYKSTGETAVSAFEIDKMYTPLFFARVRSYTAFSERPL

SEQ ID NO: 148 - protein, 447 aa, Homo sapiens
MPDIIWVFPPQAEAEEDCHSDTVRADDDEENESPAETDLQAQLQMFRAQWMFELAPGVSSSNLENRPCRAARGSLQKTSADTKGKQEQAKEEKARELFLKAVEEEQNGALYEAIKFYRRAMQLVPDIEFKITYTRSPDGDGVGNSYIEDNDDDSKMADLLSYFQQQLTFQESVLKLCQPELESSQIHISVLPMEVLMYIFRWVVSSDLDLRSLEQLSLVCRGFYICARDPEIWRLACLKVWGRSCIKLVPYTSWREMFLERPRVRFDGVYISKTTYIRQGEQSLDGFYRAWHQVEYYRYIRFFPDGHVMMLTTPEEPQSIVPRLRTRNTRTDAILLGHYRLSQDTDNQTKVFAVITKKKEEKPLDYKYRYFRRVPVQEADQSFHVGLQLCSSGHQRFNKLIWIHHSCHITYKSTGETAVSAFEIDKMYTPLFFARVRSYTAFSERPL

SEQ ID NO: 149 - protein, 1173 aa, Homo sapiens
MAVETLSPDWEFDRVDDGSQKIHAEVQLKNYGKFLEEYTSQLRRIEDALDDSIGDVWDFNLDPIALKLLPYEQSSLLELIKTENKVLNKVITVYAALCCEIKKLKYEAETKFYNGLLFYGEGATDASMVEGDCQIQMGRFISFLQELSCFVTRCYEVVMNVVHQLAALYISNKIAPKIIETTGVHFQTMYEHLGELLTVLLTLDEIIDNHITLKDHWTMYKRLLKSVHHNPSKFGIQEEKLKPFEKFLLKLEGQLLDGMIFQACIEQQFDSLNGGVSVSKNSTFAEEFAHSIRSIFANVEAKLGEPSEIDQRDKYVGICGLFVLHFQIFRTIDKKFYKSLLDICKKVPAITLTANIIWFPDNFLIQKIPAAAKLLDRKSLQAIKIHRDTFLQQKAQSLTKDVQSYYVFVSSWMMKMESILSKEQRMDKFAEDLTNRCNVFIQGFLYAYSISTIIKTTMNLYMSMQKPMTKTSVKALCRLVELLKAIEHMFYRRSMVVADSVSHITQHLQHQALHSISVAKKRVISDKKYSEQRLDVLSALVLAENTLNGPSTKQRRLIVSLALSVGTQMKTFKDEELFPLQVVMKKLDLISELRERVQTQCDCCFLYWHRAVFPIYLDDVYENAVDAARLHYMFSALRDCVPAMMHARHLESYEILLDCYDKEIMEILNEHLLDKLCKEIEKDLRLSVHTHLKLDDRNPFKVGMKDLALFFSLNPIRFFNRFIDIRAYVTHYLDKTFYNLTTVALHDWATYSEMRNLATQRYGLVMTEAHLPSQTLEQGLDVLEIMRNIHIFVSRYLYNLNNQIFIERTSNNKHLNTINIRHIANSIRTHGTGIMNTTVNFTYQFLKKKFYIFSQFMYDEHIKSRLIKDIRFFREIKDQNDHKYPFDRAEKFNRGIRKLGVTPEGQSYLDQFRQLISQIGNAMGYVRMIRSGGLHCSSNAIRFVPDLEDIVNFEELVKEEGLAEETLKAARHLDSVLSDHTRNSAEGTEYFKMLVDVFAPEFRRPKNIHLRNFYIIVPPLTLNFVEHSISCKEKLNKKNKIGAAFTDDGFAMGVAYILKLLDQYREFDSLHWFQSVREKYLKEIRAVAKQQNVQSASQDEKLLQTMNLTQKRLDVYLQEFELLYFSLSSARIFFRADKTAAEENQEKKEKEEETKTSNGDLSDSTVSADPVVK

SEQ ID NO: 150 - protein, 173 aa, Homo sapiens
MEDSFLQSFGRLSLQPQQQQQRQRPPRPPPRGTPPRRHSFRKHLYLLRGLPGSGKTTLARQLQHDFPRALIFSTDDFFFREDGAYEFNPDFLEEAHEWNQKRARKAMRNGISPIIIDNTNLHAWEMKPYAVMVFQTEQKNLFRLEMDMVVFRPEMKKHSWCLKRKNPPNERTV

SEQ ID NO: 151 - protein, 243 aa, Homo sapiens
MEDSFLQSFGRLSLQPQQQQQRQRPPRPPPRGTPPRRHSFRKHLYLLRGLPGSGKTTLARQLQHDFPRALIFSTDDFFFREDGAYEFNPDFLEEAHEWNQKRARKAMRNGISPIIIDNTNLHAWEMKPYAVMALENNYEVIFREPDTRWKFNVQELARRNIHGVSREKIHRMKERYEHDVTFHSVLHAEKPSRMNRNQDRNNALPSNNARYWNSYTEFPNRRAHGGFTNESSYHRRGGCHHGY

SEQ ID NO: 152 - protein, 1087 aa, Homo sapiens
MRAGGACRPGAAGTAAGTAAGGWDGGCGGAEPARCLTSPWCQWTGRGAATMTTSRGSVGWTTGSAPSWMTRTEELDIRPKVSSLLGKLVSYTNLTQGAKEHEEAESGEGTRRRAAEAPSMGTLMGVYLPCLQNIFGVILFLRLTWMVGTAGVLQALLIVLICCCCTLLTAISMSAIATNGVVPAGGSYFMISRSLGPEFGGAVGLCFYLGTTFAAAMYILGAIEILLTYIAPPAAIFYPSGAHDTSNATLNNMRVYGTIFLTFMTLVVFVGVKYVNKFASLFLACVIISILSIYAGGIKSIFDPPVFPVCMLGNRTLSRDQFDICAKTAVVDNETVATQLWSFFCHSPNLTTDSCDPYFMLNNVTEIPGIPGAAAGVLQENLWSAYLEKGDIVEKHGLPSADAPSLKESLPLYVVADIATSFTVLVGIFFPSVTGIMAGSNRSGDLRDAQKSIPVGTILAIITTSLVYFSSVVLFGACIEGVVLRDKYGDGVSRNLVVGTLAWPSPWVIVIGSFFSTCGAGLQSLTGAPRLLQAIAKDNIIPFLRVFGHGKVNGEPTWALLLTALIAELGILIASLDMVAPILSMFFLMCYLFVNLACAVQTLLRTPNWRPRFKYYHWALSFLGMSLCLALMFVSSWYYALVAMLIAGMIYKYIEYQGAEKEWGDGIRGLSLSAARYALLRLEEGPPHTKNWRPQLLVLLKLDEDLHVKYPRLLTFASQLKAGKGLTIVGSVIQGSFLESYGEAQAAEQTIKNMMEIEKVKGFCQVVVASKVREGLAHLIQSCGLGGMRHNSVVLGWPYGWRQSEDPRAWKTFIDTVRCTTAAHLALLVPKNIAFYPSNHERYLEGHIDVWWIVHDGGMLMLLPFLLRQHKVWRKCRMRIFTVAQMDDNSIQMKKDLAVFLYHLRLEAEVEVVEMHNSDISAYTYERTLMMEQRSQMLRQMRLTKTEREREAQLVKDRHSALRLESLYSDEEDESAVGADKIQMTWTRDKYMTETWDPSHAPDNFRELVHIKPDQSNVRRMHTAVKLNEVIVTRSHDARLVLLNMPGPPRNSEGDENYMEFLEVLTEGLERVLLVRGGGREVITIYS

SEQ ID NO: 153 - protein, 1079 aa, Homo sapiens
MPHFTVVPVDGPRRGDYDNLEGLSWVDYGERAELDDSDGHGNHRESSPFLSPLEASRGIDYYDRNLALFEEELDIRPKVSSLLGKLVSYTNLTQGAKEHEEAESGEGTRRRAAEAPSMGTLMGVYLPCLQNIFGVILFLRLTWMVGTAGVLQALLIVLICCCCTLLTAISMSAIATNGVVPAGGSYFMISRSLGPEFGGAVGLCFYLGTTFAAAMYILGAIEILLTYIAPPAAIFYPSGAHDTSNATLNNMRVYGTIFLTFMTLVVFVGVKYVNKFASLFLACVIISILSIYAGGIKSIFDPPVFPVCMLGNRTLSRDQFDICAKTAVVDNETVATQLWSFFCHSPNLTTDSCDPYFMLNNVTEIPGIPGAAAGVLQENLWSAYLEKGDIVEKHGLPSADAPSLKESLPLYVVADIATSFTVLVGIFFPSVTGIMAGSNRSGDLRDAQKSIPVGTILAIITTSLVYFSSVVLFGACIEGVVLRDKYGDGVSRNLVVGTLAWPSPWVIVIGSFFSTCGAGLQSLTGAPRLLQAIAKDNIIPFLRVFGHGKVNGEPTWALLLTALIAELGILIASLDMVAPILSMFFLMCYLFVNLACAVQTLLRTPNWRPRFKYYHWALSFLGMSLCLALMFVSSWYYALVAMLIAGMIYKYIEYQGAEKEWGDGIRGLSLSAARYALLRLEEGPPHTKNWRPQLLVLLKLDEDLHVKYPRLLTFASQLKAGKGLTIVGSVIQGSFLESYGEAQAAEQTIKNMMEIEKVKGFCQVVVASKVREGLAHLIQSCGLGGMRHNSVVLGWPYGWRQSEDPRAWKTFIDTVRCTTAAHLALLVPKNIAFYPSNHERYLEGHIDVWWIVHDGGMLMLLPFLLRQHKVWRKCRMRIFTVAQMDDNSIQMKKDLAVFLYHLRLEAEHNSDISAYTYERTLMMEQRSQMLRQMRLTKTEREREAQLVKDRHSALRLESLYSDEEDESAVGADKIQMTWTRDKYMTETWDPSHAPDNFRELVHIKPDQSNVRRMHTAVKLNEVIVTRSHDARLVLLNMPGPPRNSEGDENYMEFLEVLTEGLERVLLVRGGGREVITIYS

SEQ ID NO: 154 - protein, 1085 aa, Homo sapiens
MPHFTVVPVDGPRRGDYDNLEGLSWVDYGERAELDDSDGHGNHRESSPFLSPLEASRGIDYYDRNLALFEEELDIRPKVSSLLGKLVSYTNLTQGAKEHEEAESGEGTRRRAAEAPSMGTLMGVYLPCLQNIFGVILFLRLTWMVGTAGVLQALLIVLICCCCTLLTAISMSAIATNGVVPAGGSYFMISRSLGPEFGGAVGLCFYLGTTFAAAMYILGAIEILLTYIAPPAAIFYPSGAHDTSNATLNNMRVYGTIFLTFMTLVVFVGVKYVNKFASLFLACVIISILSIYAGGIKSIFDPPVFPVCMLGNRTLSRDQFDICAKTAVVDNETVATQLWSFFCHSPNLTTDSCDPYFMLNNVTEIPGIPGAAAGVLQENLWSAYLEKGDIVEKHGLPSADAPSLKESLPLYVVADIATSFTVLVGIFFPSVTGIMAGSNRSGDLRDAQKSIPVGTILAIITTSLVYFSSVVLFGACIEGVVLRDKYGDGVSRNLVVGTLAWPSPWVIVIGSFFSTCGAGLQSLTGAPRLLQAIAKDNIIPFLRVFGHGKVNGEPTWALLLTALIAELGILIASLDMVAPILSMFFLMCYLFVNLACAVQTLLRTPNWRPRFKYYHWALSFLGMSLCLALMFVSSWYYALVAMLIAGMIYKYIEYQGAEKEWGDGIRGLSLSAARYALLRLEEGPPHTKNWRPQLLVLLKLDEDLHVKYPRLLTFASQLKAGKGLTIVGSVIQGSFLESYGEAQAAEQTIKNMMEIEKVKGFCQVVVASKVREGLAHLIQSCGLGGMRHNSVVLGWPYGWRQSEDPRAWKTFIDTVRCTTAAHLALLVPKNIAFYPSNHERYLEGHIDVWWIVHDGGMLMLLPFLLRQHKVWRKCRMRIFTVAQMDDNSIQMKKDLAVFLYHLRLEAEVEVVEMHNSDISAYTYERTLMMEQRSQMLRQMRLTKTEREREAQLVKDRHSALRLESLYSDEEDESAVGADKIQMTWTRDKYMTETWDPSHAPDNFRELVHIKPDQSNVRRMHTAVKLNEVIVTRSHDARLVLLNMPGPPRNSEGDENYMEFLEVLTEGLERVLLVRGGGREVITIYS

SEQ ID NO: 155 - protein, 1054 aa, Homo sapiens
MGDTLSPGHGNHRESSPFLSPLEASRGIDYYDRNLALFEEELDIRPKVSSLLGKLVSYTNLTQGAKEHEEAESGEGTRRRAAEAPSMGTLMGVYLPCLQNIFGVILFLRLTWMVGTAGVLQALLIVLICCCCTLLTAISMSAIATNGVVPAGGSYFMISRSLGPEFGGAVGLCFYLGTTFAAAMYILGAIEILLTYIAPPAAIFYPSGAHDTSNATLNNMRVYGTIFLTFMTLVVFVGVKYVNKFASLFLACVIISILSIYAGGIKSIFDPPVFPVCMLGNRTLSRDQFDICAKTAVVDNETVATQLWSFFCHSPNLTTDSCDPYFMLNNVTEIPGIPGAAAGVLQENLWSAYLEKGDIVEKHGLPSADAPSLKESLPLYVVADIATSFTVLVGIFFPSVTGIMAGSNRSGDLRDAQKSIPVGTILAIITTSLVYFSSVVLFGACIEGVVLRDKYGDGVSRNLVVGTLAWPSPWVIVIGSFFSTCGAGLQSLTGAPRLLQAIAKDNIIPFLRVFGHGKVNGEPTWALLLTALIAELGILIASLDMVAPILSMFFLMCYLFVNLACAVQTLLRTPNWRPRFKYYHWALSFLGMSLCLALMFVSSWYYALVAMLIAGMIYKYIEYQGAEKEWGDGIRGLSLSAARYALLRLEEGPPHTKNWRPQLLVLLKLDEDLHVKYPRLLTFASQLKAGKGLTIVGSVIQGSFLESYGEAQAAEQTIKNMMEIEKVKGFCQVVVASKVREGLAHLIQSCGLGGMRHNSVVLGWPYGWRQSEDPRAWKTFIDTVRCTTAAHLALLVPKNIAFYPSNHERYLEGHIDVWWIVHDGGMLMLLPFLLRQHKVWRKCRMRIFTVAQMDDNSIQMKKDLAVFLYHLRLEAEVEVVEMHNSDISAYTYERTLMMEQRSQMLRQMRLTKTEREREAQLVKDRHSALRLESLYSDEEDESAVGADKIQMTWTRDKYMTETWDPSHAPDNFRELVHIKPDQSNVRRMHTAVKLNEVIVTRSHDARLVLLNMPGPPRNSEGDENYMEFLEVLTEGLERVLLVRGGGREVITIYS

SEQ ID NO: 156 - protein, 1079 aa, Homo sapiens
MAAEGAVCGFVYLEGTAWAVPEDTEPLASCTLGHGNHRESSPFLSPLEASRGIDYYDRNLALFEEELDIRPKVSSLLGKLVSYTNLTQGAKEHEEAESGEGTRRRAAEAPSMGTLMGVYLPCLQNIFGVILFLRLTWMVGTAGVLQALLIVLICCCCTLLTAISMSAIATNGVVPAGGSYFMISRSLGPEFGGAVGLCFYLGTTFAAAMYILGAIEILLTYIAPPAAIFYPSGAHDTSNATLNNMRVYGTIFLTFMTLVVFVGVKYVNKFASLFLACVIISILSIYAGGIKSIFDPPVFPVCMLGNRTLSRDQFDICAKTAVVDNETVATQLWSFFCHSPNLTTDSCDPYFMLNNVTEIPGIPGAAAGVLQENLWSAYLEKGDIVEKHGLPSADAPSLKESLPLYVVADIATSFTVLVGIFFPSVTGIMAGSNRSGDLRDAQKSIPVGTILAIITTSLVYFSSVVLFGACIEGVVLRDKYGDGVSRNLVVGTLAWPSPWVIVIGSFFSTCGAGLQSLTGAPRLLQAIAKDNIIPFLRVFGHGKVNGEPTWALLLTALIAELGILIASLDMVAPILSMFFLMCYLFVNLACAVQTLLRTPNWRPRFKYYHWALSFLGMSLCLALMFVSSWYYALVAMLIAGMIYKYIEYQGAEKEWGDGIRGLSLSAARYALLRLEEGPPHTKNWRPQLLVLLKLDEDLHVKYPRLLTFASQLKAGKGLTIVGSVIQGSFLESYGEAQAAEQTIKNMMEIEKVKGFCQVVVASKVREGLAHLIQSCGLGGMRHNSVVLGWPYGWRQSEDPRAWKTFIDTVRCTTAAHLALLVPKNIAFYPSNHERYLEGHIDVWWIVHDGGMLMLLPFLLRQHKVWRKCRMRIFTVAQMDDNSIQMKKDLAVFLYHLRLEAEVEVVEMHNSDISAYTYERTLMMEQRSQMLRQMRLTKTEREREAQLVKDRHSALRLESLYSDEEDESAVGADKIQMTWTRDKYMTETWDPSHAPDNFRELVHIKPDQSNVRRMHTAVKLNEVIVTRSHDARLVLLNMPGPPRNSEGDENYMEFLEVLTEGLERVLLVRGGGREVITIYS

SEQ ID NO: 157 - protein, 1078 aa, Homo sapiens
MSTGTQPKTKVLSDNRPKERVEIEAKEACDWLRAAGFPQYAQLYEDSQFPINIVAVKNDHDFLEKDLVEPLCRRLNTLNKCASMKLDVNFQRKKGDDSDEEDLCISNKWTFQRTSRRWSRVDDLYTLLPRGDRNGSPGGTGMRNTTSSESVLTDLSEPEVCSIHSESSGGSDSRSQPGQCCTDNPVMLDAPLVSSSLPQPPRDVLNHPFHPKNEKPTRARAKSFLKRMETLRGKGAHGRHKGSGRTGGLVISGPMLQQEPESFKAMQCIQIPNGDLQNSPPPACRKGLPCSGKSSGESSPSEHSSSGVSTPCLKERKCHEANKRGGMYLEDLDVLAGTALPDAGDQSRMHEFHSQENLVVHIPKDHKPGTFPKALSIESLSPTDSSNGVNWRTGSISLGREQVPGAREPRLMASCHRASRVSIYDNVPGSHLYASTGDLLDLEKDDLFPHLDDILQHVNGLQEVVDDWSKDVLPELQTHDTLVGEPGLSTFPSPNQITLDFEGNSVSEGRTTPSDVERDVTSLNESEPPGVRDRRDSGVGASLTRPNRRLRWNSFQLSHQPRPAPASPHISSQTASQLSLLQRFSLLRLTAIMEKHSMSNKHGWTWSVPKFMKRMKVPDYKDKAVFGVPLIVHVQRTGQPLPQSIQQALRYLRSNCLDQVGLFRKSGVKSRIHALRQMNENFPENVNYEDQSAYDVADMVKQFFRDLPEPLFTNKLSETFLHIYQYVSKEQRLQAVQAAILLLADENREVLQTLLCFLNDVVNLVEENQMTPMNLAVCLAPSLFHLNLLKKESSPRVIQKKYATGKPDQKDLNENLAAAQGLAHMIMECDRLFEVPHELVAQSRNSYVEAEIHVPTLEELGTQLEESGATFHTYLNHLIQGLQKEAKEKFKGWVTCSSTDNTDLAFKKVGDGNPLKLWKASVEVEAPPSVVLNRVLRERHLWDEDFVQWKVVETLDRQTEIYQYVLNSMAPHPSRDFVVLRTWKTDLPKGMCTLVSLSVEHEEAQLLGGVRAVVMDSQYLIEPCGSGKSRLTHICRIDLKGHSPEWYSKGFGHLCAAEVARIRNSFQPLIAEGPETKI

SEQ ID NO: 158 - protein, 1113 aa, Homo sapiens
MFSQVPRTPASGCYYLNSMTPEGQEMYLRFDQTTRRSPYRMSRILARHQLVTKIQQEIEAKEACDWLRAAGFPQYAQLYEDSQFPINIVAVKNDHDFLEKDLVEPLCRRLNTLNKCASMKLDVNFQRKKGDDSDEEDLCISNKWTFQRTSRRWSRVDDLYTLLPRGDRNGSPGGTGMRNTTSSESVLTDLSEPEVCSIHSESSGGSDSRSQPGQCCTDNPVMLDAPLVSSSLPQPPRDVLNHPFHPKNEKPTRARAKSFLKRMETLRGKGAHGRHKGSGRTGGLVISGPMLQQEPESFKAMQCIQIPNGDLQNSPPPACRKGLPCSGKSSGESSPSEHSSSGVSTPCLKERKCHEANKRGGMYLEDLDVLAGTALPDAGDQSRMHEFHSQENLVVHIPKDHKPGTFPKALSIESLSPTDSSNGVNWRTGSISLGREQVPGAREPRLMASCHRASRVSIYDNVPGSHLYASTGDLLDLEKDDLFPHLDDILQHVNGLQEVVDDWSKDVLPELQTHDTLVGEPGLSTFPSPNQITLDFEGNSVSEGRTTPSDVERDVTSLNESEPPGVRDRRDSGVGASLTRPNRRLRWNSFQLSHQPRPAPASPHISSQTASQLSLLQRFSLLRLTAIMEKHSMSNKHGWTWSVPKFMKRMKVPDYKDKAVFGVPLIVHVQRTGQPLPQSIQQALRYLRSNCLDQVGLFRKSGVKSRIHALRQMNENFPENVNYEDQSAYDVADMVKQFFRDLPEPLFTNKLSETFLHIYQYVSKEQRLQAVQAAILLLADENREVLQTLLCFLNDVVNLVEENQMTPMNLAVCLAPSLFHLNLLKKESSPRVIQKKYATGKPDQKDLNENLAAAQGLAHMIMECDRLFEVPHELVAQSRNSYVEAEIHVPTLEELGTQLEESGATFHTYLNHLIQGLQKEAKEKFKGWVTCSSTDNTDLAFKKVGDGNPLKLWKASVEVEAPPSVVLNRVLRERHLWDEDFVQWKVVETLDRQTEIYQYVLNSMAPHPSRDFVVLRTWKTDLPKGMCTLVSLSVEHEEAQLLGGVRAVVMDSQYLIEPCGSGKSRLTHICRIDLKGHSPEWYSKGFGHLCAAEVARIRNSFQPLIAEGPETKI

SEQ ID NO: 159 - protein, 995 aa, Homo sapiens
MKLDVNFQRKKGDDSDEEDLCISNKWTFQRTSRRWSRVDDLYTLLPRGDRNGSPGGTGMRNTTSSESVLTDLSEPEVCSIHSESSGGSDSRSQPGQCCTDNPVMLDAPLVSSSLPQPPRDVLNHPFHPKNEKPTRARAKSFLKRMETLRGKGAHGRHKGSGRTGGLVISGPMLQQEPESFKAMQCIQIPNGDLQNSPPPACRKGLPCSGKSSGESSPSEHSSSGVSTPCLKERKCHEANKRGGMYLEDLDVLAGTALPDAGDQSRMHEFHSQENLVVHIPKDHKPGTFPKALSIESLSPTDSSNGVNWRTGSISLGREQVPGAREPRLMASCHRASRVSIYDNVPGSHLYASTGDLLDLEKDDLFPHLDDILQHVNGLQEVVDDWSKDVLPELQTHDTLVGEPGLSTFPSPNQITLDFEGNSVSEGRTTPSDVERDVTSLNESEPPGVRDRRDSGVGASLTRPNRRLRWNSFQLSHQPRPAPASPHISSQTASQLSLLQRFSLLRLTAIMEKHSMSNKHGWTWSVPKFMKRMKVPDYKDKAVFGVPLIVHVQRTGQPLPQSIQQALRYLRSNCLDQVGLFRKSGVKSRIHALRQMNENFPENVNYEDQSAYDVADMVKQFFRDLPEPLFTNKLSETFLHIYQYVSKEQRLQAVQAAILLLADENREVLQTLLCFLNDVVNLVEENQMTPMNLAVCLAPSLFHLNLLKKESSPRVIQKKYATGKPDQKDLNENLAAAQGLAHMIMECDRLFEVPHELVAQSRNSYVEAEIHVPTLEELGTQLEESGATFHTYLNHLIQGLQKEAKEKFKGWVTCSSTDNTDLAFKKVGDGNPLKLWKASVEVEAPPSVVLNRVLRERHLWDEDFVQWKVVETLDRQTEIYQYVLNSMAPHPSRDFVVLRTWKTDLPKGMCTLVSLSVEHEEAQLLGGVRAVVMDSQYLIEPCGSGKSRLTHICRIDLKGHSPEWYSKGFGHLCAAEVARIRNSFQPLIAEGPETKI

SEQ ID NO: 160 - protein, 1105 aa, Homo sapiens
MLEPSSVLHANVNQAPLWCLVLRWCRECKDTVCGGKQKSRVNHTFQRREIEAKEACDWLRAAGFPQYAQLYEDSQFPINIVAVKNDHDFLEKDLVEPLCRRLNTLNKCASMKLDVNFQRKKGDDSDEEDLCISNKWTFQRTSRRWSRVDDLYTLLPRGDRNGSPGGTGMRNTTSSESVLTDLSEPEVCSIHSESSGGSDSRSQPGQCCTDNPVMLDAPLVSSSLPQPPRDVLNHPFHPKNEKPTRARAKSFLKRMETLRGKGAHGRHKGSGRTGGLVISGPMLQQEPESFKAMQCIQIPNGDLQNSPPPACRKGLPCSGKSSGESSPSEHSSSGVSTPCLKERKCHEANKRGGMYLEDLDVLAGTALPDAGDQSRMHEFHSQENLVVHIPKDHKPGTFPKALSIESLSPTDSSNGVNWRTGSISLGREQVPGAREPRLMASCHRASRVSIYDNVPGSHLYASTGDLLDLEKDDLFPHLDDILQHVNGLQEVVDDWSKDVLPELQTHDTLVGEPGLSTFPSPNQITLDFEGNSVSEGRTTPSDVERDVTSLNESEPPGVRDRRDSGVGASLTRPNRRLRWNSFQLSHQPRPAPASPHISSQTASQLSLLQRFSLLRLTAIMEKHSMSNKHGWTWSVPKFMKRMKVPDYKDKAVFGVPLIVHVQRTGQPLPQSIQQALRYLRSNCLDQVGLFRKSGVKSRIHALRQMNENFPENVNYEDQSAYDVADMVKQFFRDLPEPLFTNKLSETFLHIYQYVSKEQRLQAVQAAILLLADENREVLQTLLCFLNDVVNLVEENQMTPMNLAVCLAPSLFHLNLLKKESSPRVIQKKYATGKPDQKDLNENLAAAQGLAHMIMECDRLFEVPHELVAQSRNSYVEAEIHVPTLEELGTQLEESGATFHTYLNHLIQGLQKEAKEKFKGWVTCSSTDNTDLAFKKVGDGNPLKLWKASVEVEAPPSVVLNRVLRERHLWDEDFVQWKVVETLDRQTEIYQYVLNSMAPHPSRDFVVLRTWKTDLPKGMCTLVSLSVEHEEAQLLGGVRAVVMDSQYLIEPCGSGKSRLTHICRIDLKGHSPEWYSKGFGHLCAAEVARIRNSFQPLIAEGPETKI

SEQ ID NO: 161 - protein, 646 aa, Homo sapiens
MKLDVNFQRKKGDDSDEEDLCISNKWTFQRTSRRWSRVDDLYTLLPRGDRNGSPGGTGMRNTTSSESVLTDLSEPEVCSIHSESSGGSDSRSQPGQCCTDNPVMLDAPLVSSSLPQPPRDVLNHPFHPKNEKPTRARAKSFLKRMETLRGKGAHGRHKGSGRTGGLVISGPMLQQEPESFKAMQCIQIPNGDLQNSPPPACRKGLPCSGKSSGESSPSEHSSSGVSTPCLKERKCHEANKRGGMYLEDLDVLAGTALPDAGDQSRMHEFHSQENLVVHIPKDHKPGTFPKALSIESLSPTDSSNGVNWRTGSISLGREQVPGAREPRLMASCHRASRVSIYDNVPGSHLYASTGDLLDLEKDDLFPHLDDILQHVNGLQEVVDDWSKDVLPELQTHDTLVGEPGLSTFPSPNQITLDFEGNSVSEGRTTPSDVERDVTSLNESEPPGVRDRRDSGVGASLTRPNRRLRWNSFQLSHQPRPAPASPHISSQTASQLSLLQRFSLLRLTAIMEKHSMSNKHGWTWSVPKFMKRMKVPDYKDKAVFGVPLIVHVQRTGQPLPQSIQQALRYLRSNCLDQVGLFRKSGVKSRIHALRQMNENFPENVNYEDQSAYDVADMVKQFFRDLPEPLFTNKLSETFLHIYQCKWK

SEQ ID NO: 162 - protein, 687 aa, Homo sapiens
MLEPSSVLHANVNQAPLWCLVLRWCRECKDTVCGGKQKSRVNHTFQRREIEAKEACDWLRAAGFPQYAQLYEDSQFPINIVAVKNDHDFLEKDLVEPLCRRLNTLNKCASMKLDVNFQRKKGDDSDEEDLCISNKWTFQRTSRRWSRVDDLYTLLPRGDRNGSPGGTGMRNTTSSESVLTDLSEPEVCSIHSESSGGSDSRSQPGQCCTDNPVMLDAPLVSSSLPQPPRDVLNHPFHPKNEKPTRARAKSFLKRMETLRGKGAHGRHKGSGRTGGLVISGPMLQQEPESFKAMQCIQIPNGDLQNSPPPACRKGLPCSGKSSGESSPSEHSSSGVSTPCLKERKCHEANKRGGMYLEDLDVLAGTALPDAGDQSRMHEFHSQENLVVHIPKDHKPGTFPKALSIESLSPTDSSNGVNWRTGSISLGREQVPGAREPRLMASCHRASRVSIYDNVPGSHLYASTGDLLDLEKDDLFPHLDDILQHVNGLQEVVDDWSKDVLPELQTHDTLVGEPGLSTFPSPNQITLDFEGNSVSEGRTTPSDVERDVTSLNESEPPGVRDRRDSGVGASLTRPNRRLRWNSFQLSHQPRPAPASPHISSQTASQLSLLQRFSLLRLTAIMEKHSMSNKHGWTWSVPKFMKRMKVPDYKDKAVFGVPLIVHVQRTGQPLPQSIQQALRYLRSNCLDQE

SEQ ID NO: 163 - protein, 1591 aa, Homo sapiens
MKLYVFLVNTGTTLTFDTELTVQTVADLKHAIQSKYKIAIQHQVLVVNGGECMAADRRVCTYSAGTDTNPIFLFNKEMILCDRPPAIPKTTFSTENDMEIKVEESLMMPAVFHTVASRTQLALEMYEVAKKLCSFCEGLVHDEHLQHQGWAAIMANLEDCSNSYQKLLFKFESIYSNYLQSIEDIKLKLTHLGTAVSVMAKIPLLECLTRHSYRECLGRLDSLPEHEDSEKAEMKRSTELVLSPDMPRTTNESLLTSFPKSVEHVSPDTADAESGKEIRESCQSTVHQQDETTIDTKDGDLPFFNVSLLDWINVQDRPNDVESLVRKCFDSMSRLDPRIIRPFIAECRQTIAKLDNQNMKAIKGLEDRLYALDQMIASCGRLVNEQKELAQGFLANQKRAENLKDASVLPDLCLSHANQLMIMLQNHRKLLDIKQKCTTAKQELANNLHVRLKWCCFVMLHADQDGEKLQALLRLVIELLERVKIVEALSTVPQMYCLAVVEVVRRKMFIKHYREWAGALVKDGKRLYEAEKSKRESFGKLFRKSFLRNRLFRGLDSWPPSFCTQKPRKFDCELPDISLKDLQFLQSFCPSEVQPFLRVPLLCDFEPLHQHVLALHNLVKAAQSLDEMSQTITDLLSEQKASVSQTSPQSASSPRMESTAGITTTTSPRTPPPLTVQDPLCPAVCPLEELSPDSIDAHTFDFETIPHPNIEQTIHQVSLDLDSLAESPESDFMSAVNEFVIEENLSSPNPISDPQSPEMMVESLYSSVINAIDSRRMQDTNVCGKEDFGDHTSLNVQLERCRVVAQDSHFSIQTIKEDLCHFRTFVQKEQCDFSNSLKCTAVEIRNIIEKVKCSLEITLKEKHQKELLSLKNEYEGKLDGLIKETEENENKIKKLKGELVCLEEVLQNKDNEFALVKHEKEAVICLQNEKDQKLLEMENIMHSQNCEIKELKQSREIVLEDLKKLHVENDEKLQLLRAELQSLEQSHLKELEDTLQVRHIQEFEKVMTDHRVSLEELKKENQQIINQIQESHAEIIQEKEKQLQELKLKVSDLSDTRCKLEVELALKEAETDEIKILLEESRAQQKETLKSLLEQETENLRTEISKLNQKIQDNNENYQVGLAELRTLMTIEKDQCISELISRHEEESNILKAELNKVTSLHNQAFEIEKNLKEQIIELQSKLDSELSALERQKDEKITQQEEKYEAIIQNLEKDRQKLVSSQEQDREQLIQKLNCEKDEAIQTALKEFKLEREVVEKELLEKVKHLENQIAKSPAIDSTRGDSSSLVAELQEKLQEEKAKFLEQLEEQEKRKNEEMQNVRTSLIAEQQTNFNTVLTREKMRKENIINDLSDKLKSTMQQQERDKDLIESLSEDRARLLEEKKKLEEEVSKLRSSSFVPSPYVATAPELYGACAPELPGESDRSAVETADEGRVDSAMETSMMSVQENIHMLSEEKQRIMLLERTLQLKEEENKRLNQRLMSQSMSSVSSRHSEKIAIRDFQVGDLVLIILDERHDNYVLFTVSPTLYFLHSESLPALDLKPASGASRRPWVLGKVMEKEYCQAKKAQNRFKVPLGTKFYRVKAVSWNKKV

SEQ ID NO: 164 - protein, 1594 aa, Homo sapiens
MKLYVFLVNTGTTLTFDTELTVQTVADLKHAIQSKYKIAIQHQVLVVNGGECMAADRRVCTYSAGTDTNPIFLFNKEMILCDRPPAIPKTTFSTENDMEIKVEESLMMPAVFHTVASRTQLALEMYEVAKKLCSFCEGLVHDEHLQHQGWAAIMANLEDCSNSYQKLLFKFESIYSNYLQSIEDIKLKLTHLGTAVSVMAKIPLLECLTRHSYRECLGRLDSLPEHEDSEKAEMKRSTELVLSPDMPRTTNESLLTSFPKSVEHVSPDTADAESGKEIRESCQSTVHQQDETTIDTKDGDLPFFNVSLLDWINVQDRPNDVESLVRKCFDSMSRLDPRIIRPFIAECRQTIAKLDNQNMKAIKGLEDRLYALDQMIASCGRLVNEQKELAQGFLANQKRAENLKDASVLPDLCLSHANQLMIMLQNHRKLLDIKQKCTTAKQELANNLHVRLKWCCFVMLHADQDGEKLQALLRLVIELLERVKIVEALSTVPQMYCLAVVEVVRRKMFIKHYREWAGALVKDGKRLYEAEKSKRESFGKLFRKSFLRNRLFRGLDSWPPSFCTQKPRKFDCELPDISLKDLQFLQSFCPSEVQPFLRVPLLCDFEPLHQHVLALHNLVKAAQSLDEMSQTITDLLSEQKASVSQTSPQSASSPRMESTAGITTTTSPRTPPPLTVQDPLCPAVCPLEELSPDSIDAHTFDFETIPHPNIEQTIHQVSLDLDSLAESPESDFMSAVNEFVIEENLSSPNPISDPQSPEMMVESLYSSVINAIDSRRMQDTNVCGKEDFGDHTSLNVQLERCRVVAQDSHFSIQTIKEDLCHFRTFVQKEQCDFSNSLKCTAVEIRNIIEKVKCSLEITLKEKHQKELLSLKNEYEGKLDGLIKETEENENKIKKLKGELVCLEEVLQNKDNEFALVKHEKEAVICLQNEKDQKLLEMENIMHSQNCEIKELKQSREIVLEDLKKLHVENDEKLQLLRAELQSLEQSHLKELEDTLQVRHIQEFEKVMTDHRVSLEELKKENQQIINQIQESHAEIIQEKEKQLQELKLKVSDLSDTRCKLEVELALKEAETDEIKILLEESRAQQKETLKSLLEQETENLRTEISKLNQKIQDNNENYQVGLAELRTLMTIEKDQCISELISRHEEESNILKAELNKVTSLHNQAFEIEKNLKEQIIELQSKLDSELSALERQKDEKITQQEEKYEAIIQNLEKDRQKLVSSQEQDREQLIQKLNCEKDEAIQTALKEFKLEREVVEKELLEKVKHLENQIAKSPAIDSTRGDSSSLVAELQEKLQEEKAKFLEQLEEQEKRKNEEMQNVRTSLIAEQQTNFNTVLTREKMRKENIINDLSDKLKSTMQQQERDKDLIESLSEDRARLLEEKKKLEEEVSKLRSSSFVPSPYVATAPELYGACAPELPGESDRSAVETADEGRVDSAMETSMMSVQENIHMLSEEKQRIMLLERTLQLKEEENKRLNQRLMSQSMSSVSSRHSEKIAIRDFQVGDLVLIILDERHDNYVLFTVSPTLYFLHSESLPALDLKPGEGASGASRRPWVLGKVMEKEYCQAKKAQNRFKVPLGTKFYRVKAVSWNKKV
